United States Patent Application Publication US 2022/0211063 A1 - sequence listing, part 41

SEQ ID NO: 107 - DNA, 2041264 bp, Penicillium roqueforti
  misc_feature (6318)..(9203): n is a, c, g, or t
  misc_feature (163146)..(163250): n is a, c, g, or t
  misc_feature (224980)..(225350): n is a, c, g, or t
  misc_feature (232852)..(233748): n is a, c, g, or t
  misc_feature (335830)..(335958): n is a, c, g, or t
  misc_feature (386281)..(386450): n is a, c, g, or t
  misc_feature (488102)..(488302): n is a, c, g, or t
  misc_feature (690709)..(690875): n is a, c, g, or t
  misc_feature (737969)..(738088): n is a, c, g, or t
  misc_feature (751667)..(752129): n is a, c, g, or t
  misc_feature (756433)..(759968): n is a, c, g, or t
  misc_feature (768622)..(770119): n is a, c, g, or t
  misc_feature (808723)..(808749): n is a, c, g, or t
  misc_feature (904248)..(904482): n is a, c, g, or t
  misc_feature (906016)..(908503): n is a, c, g, or t
  misc_feature (912403)..(914466): n is a, c, g, or t
  misc_feature (922389)..(925119): n is a, c, g, or t
  misc_feature (1111664)..(1111683): n is a, c, g, or t
  misc_feature (1117861)..(1117992): n is a, c, g, or t
  misc_feature (1132981)..(1133093): n is a, c, g, or t
  misc_feature (1318137)..(1318137): n is a, c, g, or t
  misc_feature (1379475)..(1380126): n is a, c, g, or t
  misc_feature (1646552)..(1646698): n is a, c, g, or t
  misc_feature (1894841)..(1894860): n is a, c, g, or t
  misc_feature (1895403)..(1895619): n is a, c, g, or t
tatatcttttaaattaagttatataaagatctttatattaaatagttaatctatagtcttactaattaatagtaaggaatattagttcttaagatttaatatattaagtccctaataatctatatatagatataattttctatccttttttaatataaataaaataggtatatctattaagctttataataacttaatttagcctttcttaatatattctttaatataatcttaaaatactataagttttatcttaaaaagagagtaaattaatttataaggaatttatttacctacttttattttaataatataattatatttattactttctaataagttctctatttttttaaaattaaagatattagtctaatctatatattagataggtaaagctttctttataccttatattataataaagagtaggataggcttaccttttataattaaatagggatatattataagtataagggccttatagagaatctcttatataaaggctattatagttatccttttaatctttttattaaataagtaataatactatacctagtttttttagttaatattaggattaatagcttctaattaattaaatctaataattaggttatatcctattatcttaactactttataagagagtatatattaatatactatatctctactattttatagtttactatttagcttataggaattataggaatagactatagagctatctatagctataatagattttagggagcctatatctatatatagaaggtactatttaacctagttctaatttataaaggtctttttaactctactatctattagtatctatataatatatttagtaaataagctatacatataactgagctatataccctaaccaacctactggaatttaaatgtatttattttaaccataatactattaaatttattaaactaaaaagaatcatttatctagatatctattgatcttatgccctatctttctatacctactataccttagtatagcctatagatatggttttaaccccaattaagtacttctactaacctagtaattattttagaagcttcttagactaaaagaccctctatagtaggtatttactatctagattaggtctatttttacttcttcttcttatttttagtatataaattacttatttctttcttaagaagtatagtagattatatagttatttaataggcttttaaaacctagttaattactaaatttagtaagcttagagggctttttaatcttatctaaagtaatactttaatagataaagcctacttttatataaagactataaaactattaagtattaaaagttaatatcttcctattatatataaaaaaatcgatagtataaagagtttctaaagttaataaagcttaattttattagatatctaattatttagattaactttgaattattaattactaaaaaggctattaaactaagatttaataaagactttacctttaaaaataatatatagagaaaggacctaccctattatatttatatatttaatagtagttatctactattaaataatagtttttttaaataagattaaactatttactaattacttttaagtctttatattttatatacttataattataatatcttaagaattaagataagaggttagggtactatttaataaagttataaacctatttcttactaactaaaataactaggatagttttatattattaaagaagaatattagctatttcttatataaaagaatattagggggatattttatataaatctatagaaagtatctatttctaaagagattcctctttaattatagttaatttagaagaattagtatataaagttatatattattaaatactatataagtatatatagagtatagatttaggtatattaaagatatatactatcctataaatagatatagtcttttctttcttaaaagcctagatagctaataagatcctatcctcctactctattaattttataggtaattaggggtattttagtggtatagtaggcagttaaattaactaagtactaatttatagacgcgttttagttagggtatatagctcggttatatatatagcttacttaccgaatatattagtttattctttattattaattttaatactaactttataaataaaagtaagttttaacttatacttaatattattaagtcctaatactactaatactataaatattaaggtaattagttttttaattataaattccctttagtctctttatagatatttatatagtaacctagctttctatacttaaagtagttattatagaggatactattaggatttattttttatttattatatttatatttattattagatttattatcctacttatccttacctttacttttaaacctatctttatatttctttatctttaatataaataaagtataagagttaagactaatatctaggcttagatctaatttagtagtattatttttactattactaatacttttctctttctatatataaagtaatttctattagttagagatttaactttctattataaaaagatatctaatatatattttatatatttctaactctatatactattttaataacttagtataaactatattaattactttagcctaaaggtattctttctaatactattaattatataggtactttagatagtaatagatagtattaaactatattataaatatctatatagattaatattatttctattataaaatactatattctaatatattatttttatagatattttaaggattatttataagatatagatagaagtcctagaagttttattaaatagtaaattctttaaatatctttatataagactactaattatttaattatagtctttaccttatataaactaaaattatactattactaatatttattaaaatataattaaaattagttaataaaggtatagtattattaagttatatttctataaaatagtttaatatttatagattctcttaatatataaatataatatcttttaataacctatagtataatatagttatttatatttattaaaataagagactttatttactttaagatttctaattctataaagaggttttagtattccttccttatcttagtttctttaatatatttcctaagttaattaagggttaataagaaaagatttataagatattatactaatattaggtctaatagtatagtagtttcctatattaattctaaggtatctataaaaagatagtttataatagaaagaaggatttaattaattaaagcctatttattaggctataatattatagggagtccctataactatatattataagggtttaatataatataaactaatataaataaagggtagtctctattaggtaatctaagtatttaaaagctattagaactataagacccctaggtatacaatacctaagggaatactatgtataggtttatatatattcctctcttatacagacctttatctattatacctaatacttgactacctagctatttacctatttaaatactaggcatttgaccccttaagagtatattataaagtattgtgcctagttctaccatactctaataatatatgataataaagatattccttcccgagcctatataggtttatatatatttccctcttgtatagactttatctgttacagccccctcgagactggtaagaattggtcttagtatattatcaatatatcatgttccctctataaagccctttatgtattacctagttaggtcttatacctataaagtttatactagtgtgaaaatgagtgagacagaacttttgaaacttctagttaataccttatccctgctcttccatttcccttattttatataagcataaatcatggcaagtgacaaccagtggttccatagctcagttggttagagcgctgtgctaataacgcagatgtcgagggttcgaccccctctgggaccattcttttttgttttttgtttttcgataaatcttatcagaatgtgatagttatggctcatttaagccttaaacaggaacattggtttttgttatagtctagtggaaaatatgctgcacgattttccgtcaaatcctcttctatcagtatccatcaatcgtctttggactttgatcgatcttcccatcttctatcagcttcacctctcactttttcaaattcaacccaatggccaagcattacacgatagctcgaagctctctgttctgtactagacgtgcagcaatcaaaagcaagccacctagtagcaaggatacccctgaaaatattgacagggaaaggtacccgtacttctcgagcagagcaccactgatgggcacatttgccatagcgctgcagttccagtcagcatactacattatcatttcaagatatgggggtcatacgatagagctgtggcacccgacacagtcccaattgccaagccaagagtggtagaagtagcaacctgggcggcacaagcttgctggagggataaaatgccctacaaatctagtcagcattcgaagtttataccattcgaggataactcactccagacgcaaagccataggcagcggaccaaattaccagaccggccacagatgtgactttagtccagcacaatgcaacaacccctgcggatatagttgctatgatgcaacagttgaattttccgtacttgtcggcaacgatgccagggaggactcgaccgaagaatgaagccccattcacaatggaaacagtatagaatgccagagatgtcgagaatcctttctcaaccgcgtaggaagtcgtgtagaaaaacggcgagaacatgccaaagtatgtaatgaacatggcgaggcacagtagctgcagcgacggttttcgaaaaagggccatcgcttctgccttgtgactctgcggcttatccttttgctccgcggtatcttcgtcacttttctggtttgaatcacgactctccaaattgattgcaggcgtattcggagatttggcgactgcacaagagaagataaagcaaggaatcatgataaatccgacgattcgcatggtccagggaaacccaatcttgggcttattgatcagtctgtcgattgcaacgggccagataactccgccgagcgatgaacccgcaagcacaatccccatcgcggcagcacgcttcacttttatatattgtccgaccagtgcgagcatcggccatgtcaccatagccatggagacacctaacagaataccctgagcgaggaggaattgatagaactcctggcatagtgaagtcatcataattgcaaaaacacacccgaatgaaccaacatataccatgaactgttcaaaggaagtatgagttttatttctcgacgattcaggaagagtatgcttaccgttggtccaaagatatcaagcattgctcccgccacgacagatatagcaaacaaaaagaatattgacacagctccgatccatgcgatggtagatgtcgaggttgaggatagctggttttttgtgtagtactcttggaagataccgaacgagttcataaaccccacggtgcaaaaggtacaagtgaaggcgcctaatataactagccatgctcggggcctagaagaggttagtgcactggtcggctacatatcttgtagcttgaagtatatttcacttacgtgtattcagttggaggactatcctttggtgacattttggcagaaatgaaatggctctagttaaaagcaagatgactacggaataccatgacctttataagaaatctgactccttaattacatctgaaaatcactctcggagtctccgggctactgtctagatgccccggaggaagaattgacagatatggtttagcgtctcggagaatccgcggagtctccgggccaacacttcaagctgtctcctatgcgaaaaacgcgctgtttctttgctttcgctgggtcactattattaaactgttttcggggagattgaaaacatgaaacgaagacaagtttctggagtcgtcaccccaggcccgaaaagacagtctcgacaagaccccgtttcctgcgagtcctgtcgaaagaagaagctgaagtgcgacagagagcttccctgtagtagctgttcttcgcgtaaactggagtgcagctatggcagctacgcctcgggggcaacccctgtgcgacnnnnnnnnnnnnnnnnnnnnnnnnnnnnnnnnnnnnnnnnnnnnnnnnnnnnnnnnnnnnnnnnnnnnnnnnnnnnnnnnnnnnnnnnnnnnnnnnnnnnnnnnnnnnnnnnnnnnnnnnnnnnnnnnnnnnnnnnnnnnnnnnnnnnnnnnnnnnnnnnnnnnnnnnnnnnnnnnnnnnnnnnnnnnnnnnnnnnnnnnnnnnnnnnnnnnnnnnnnnnnnnnnnnnnnnnnnnnnnnnnnnnnnnnnnnnnnnnnnnnnnnnnnnnnnnnnnnnnnnnnnnnnnnnnnnnnnnnnnnnnnnnnnnnnnnnnnnnnnnnnnnnnnnnnnnnnnnnnnnnnnnnnnnnnnnnnnnnnnnnnnnnnnnnnnnnnnnnnnnnnnnnnnnnnnnnnnnnnnnnnnnnnnnnnnnnnnnnnnnnnnnnnnnnnnnnnnnnnnnnnnnnnnnnnnnnnnnnnnnnnnnnnnnnnnnnnnnnnnnnnnnnnnnnnnnnnnnnnnnnnnnnnnnnnnnnnnnnnnnnnnnnnnnnnnnnnnnnnnnnnnnnnnnnnnnnnnnnnnnnnnnnnnnnnnnnnnnnnnnnnnnnnnnnnnnnnnnnnnnnnnnnnnnnnnnnnnnnnnnnnnnnnnnnnnnnnnnnnnnnnnnnnnnnnnnnnnnnnnnnnnnnnnnnnnnnnnnnnnnnnnnnnnnnnnnnnnnnnnnnnnnnnnnnnnnnnnnnnnnnnnnnnnnnnnnnnnnnnnnnnnnnnnnnnnnnnnnnnnnnnnnnnnnnnnnnnnnnnnnnnnnnnnnnnnnnnnnnnnnnnnnnnnnnnnnnnnnnnnnnnnnnnnnnnnnnnnnnnnnnnnnnnnnnnnnnnnnnnnnnnnnnnnnnnnnnnnnnnnnnnnnnnnnnnnnnnnnnnnnnnnnnnnnnnnnnnnnnnnnnnnnnnnnnnnnnnnnnnnnnnnnnnnnnnnnnnnnnnnnnnnnnnnnnnnnnnnnnnnnnnnnnnnnnnnnnnnnnnnnnnnnnnnnnnnnnnnnnnnnnnnnnnnnnnnnnnnnnnnnnnnnnnnnnnnnnnnnnnnnnnnnnnnnnnnnnnnnnnnnnnnnnnnnnnnnnnnnnnnnnnnnnnnnnnnnnnnnnnnnnnnnnnnnnnnnnnnnnnnnnnnnnnnnnnnnnnnnnnnnnnnnnnnnnnnnnnnnnnnnnnnnnnnnnnnnnnnnnnnnnnnnnnnnnnnnnnnnnnnnnnnnnnnnnnnnnnnnnnnnnnnnnnnnnnnnnnnnnnnnnnnnnnnnnnnnnnnnnnnnnnnnnnnnnnnnnnnnnnnnnnnnnnnnnnnnnnnnnnnnnnnnnnnnnnnnnnnnnnnnnnnnnnnnnnnnnnnnnnnnnnnnnnnnnnnnnnnnnnnnnnnnnnnnnnnnnnnnnnnnnnnnnnnnnnnnnnnnnnnnnnnnnnnnnnnnnnnnnnnnnnnnnnnnnnnnnnnnnnnnnnnnnnnnnnnnnnnnnnnnnnnnnnnnnnnnnnnnnnnnnnnnnnnnnnnnnnnnnnnnnnnnnnnnnnnnnnnnnnnnnnnnnnnnnnnnnnnnnnnnnnnnnnnnnnnnnnnnnnnnnnnnnnnnnnnnnnnnnnnnnnnnnnnnnnnnnnnnnnnnnnnnnnnnnnnnnnnnnnnnnnnnnnnnnnnnnnnnnnnnnnnnnnnnnnnnnnnnnnnnnnnnnnnnnnnnnnnnnnnnnnnnnnnnnnnnnnnnnnnnnnnnnnnnnnnnnnnnnnnnnnnnnnnnnnnnnnnnnnnnnnnnnnnnnnnnnnnnnnnnnnnnnnnnnnnnnnnnnnnnnnnnnnnnnnnnnnnnnnnnnnnnnnnnnnnnnnnnnnnnnnnnnnnnnnnnnnnnnnnnnnnnnnnnnnnnnnnnnnnnnnnnnnnnnnnnnnnnnnnnnnnnnnnnnnnnnnnnnnnnnnnnnnnnnnnnnnnnnnnnnnnnnnnnnnnnnnnnnnnnnnnnnnnnnnnnnnnnnnnnnnnnnnnnnnnnnnnnnnnnnnnnnnnnnnnnnnnnnnnnnnnnnnnnnnnnnnnnnnnnnnnnnnnnnnnnnnnnnnnnnnnnnnnnnnnnnnnnnnnnnnnnnnnnnnnnnnnnnnnnnnnnnnnnnnnnnnnnnnnnnnnnnnnnnnnnnnnnnnnnnnnnnnnnnnnnnnnnnnnnnnnnnnnnnnnnnnnnnnnnnnnnnnnnnnnnnnnnnnnnnnnnnnnnnnnnnnnnnnnnnnnnnnnnnnnnnnnnnnnnnnnnnnnnnnnnnnnnnnnnnnnnnnnnnnnnnnnnnnnnnnnnnnnnnnnnnnnnnnnnnnnnnnnnnnnnnnnnnnnnnnnnnnnnnnnnnnnnnnnnnnnnnnnnnnnnnnnnnnnnnnnnnnnnnnnnnnnnnnnnnnnnnnnnnnnnnnnnnnnnnnnnnnnnnnnnnnnnnnnnnnnnnnnnnnnnnnnnnnnnnnnnnnnnnnnnnnnnnnnnnnnnnnnnnnnnnnnnnnnnnnnnnnnnnnnnnnnnnnnnnnnnnnnnnnnnnnnnnnnnnnnnnnnnnnnnnnnnnnnnnnnnnnnnnnnnnnnnnnnnnnnnnnnnnnnnnnnnnnnnnnnnnnnnnnnnnnnnnnnnnnnnnnnnnnnnnnnnnnnnnnnnnnnnnnnnnnnnnnnnnnnnnnnnnnnnnnnnnnnnnnnnnnnnnnnnnnnnnnnnnnnnnnnnnnnnnnnnnnnnnnnnnnnnnnnnnnnnnnnnnnnnnnnnnnnnnnnnnnnnnnnnnnnnnnnnnnnnnnnnnnnnnnnnnnnnnnnnnnnnnnnnnnnnnnnnnnnnnnnnnnnnnnnnnnnnnnnnnnnnnnnnnnnnnnnnnnnnnnnnnnnnnnnnnnnnnnnnnnnnnnnnnnnnnnnnnnnnnnnnnnnnnnnggttccatagctcagttggttagagcgctgtgctaataacgcagatgtcgagggttcgaccccctctgggaccattttttgctcctcttctatcagtatccgttcccgaccgcctttggactttgatcgatcttattcttcccatgttctatcagcctcatctcttactttcttaatgatgcaaagctcaaatggttaagctattgcagcttcaaaaaccatctgccttcctcttagtaatggtgcagacctctggtagatcctttgatatcgctttttgcggaggatatctattttgatctcgaagagaacgatcttccttcccggacgaatgaagaaactgaagagcagctggagcttcgaaataagattgttagatatctcaagagcaacatgtgggggaaacataatggatatatccagttcggtgataattacgagtacgatgtcttccctattgttctatactagtatctaaacgatagatcccttcgtgagagaaagaatactatccataatactattaacagtatttttccagctatttgagagacactcccctcggccgactgcctatactattgagtgacatttggagtattaccctccatctactcctgtacttatcagacgagattatttgtgtgagccgaacttgttctatggagaacgaagtgtaagtaatagacgaaccccgaaccccatcctcttcaaagtatatatattaattaaagttgtcttattgacatagctcgatggcatttattctggtgaggaccatgttgatcgttattacaaaccacaagtatagggttagcagcaagaggaagatcagtggagatatcatataagaggaagtttctagaaaatactcctcattccttcggatggaagtaggctgcaatgactgcgaagacgattaccatgacgatagaaaaaagctacctgctaaaaaaaaagccagaaaccgagaagtaactagaagagaagctctcggtaaggtatcttggttgtgtctgaaggagtaaagaatgcgactactgtgctgtgttataacctgccttataaaagagccttttaagatactccaggagatacctactaagaagatacttaccagtattctcgagaggataaaataagattttcatgagcgatatgaatccttccttgacagctataaagtgagtacattcggtagaggaaatactataagccgcccttataccaaacacaatctcaactttaacaatcttgagatccggttctgttgggatcgatgagtaagtccaatgctagtatccataagctatggcctaacatctcttagattacgggcaataggtaggtaccccgaggaagaggataacccaggagtctaccttcatatcttataaacctaacagagaaagttttggttgtatattagccaatctattaagctaatagaccggatttacaagcactgtgataaggtatactgtaggctaaatccatcactttattacagcgtgtgggattccagctcttatgcttcggacgccttaaagcttaaccaatggccgagcggatagcttttctctatgttaggtgataaattttcgttttccctattgcaaaatccttgcagctttcctggcaggtcgaagattaagttttttttttttaaccattgctttcgaagacccccaggtctttcctttagcgcgtcaggtgtgtagtatatatcctgctagtaggttagttattgccgtggaagctgtcaaaaagggtggagatgattgggtctggccttttactcatggaaagagggcatttctcagtatgaacagcctttgacgaatttcaaacacctatgctaaatccgaaaaaaaagaaaacgatgtaaatataaccccagttagttataggggaaacctatatagatgctaccccccttggtctatccttggccggatctgtctactctatagcccgatgcgacacaacccgttggtccgctagcacaatggcagtaatggatgatgtaggattctacctgaatatatagataagaacaatattccgaaagctttaagtaccttattccagggatccagggaggtatatatcagcacaaagtctaagtttgatgggggtagtccattcgcaaacggtcagaacccaaagaaccaatcagataaaagaatatgaatcctagctaatgagactactccaaacagactgtaaaatctgcagaacccgagttgatggattattttatttgagatagctgaatgttctgcatctgtacgtagatggtgcttgaggccgtagtggtgatataaatctcacccccgcacgctatctctctctagcttattgtctatttcgattcgcacaatcatgcagcactggctgaattatgtaaaagttgcctgttgtgctatgtaatcggttccatagctcagttggttagagcgctgtgctaataacgcagatgtcgagggttcgaccccctctgggaccattttttttttcggacagaaaatcgcgataatgcgaatgtattggtcgatttcttacagcagaaatatctctacatggtccgaaatgtataatctggtacggaggtccatttcaaaagttctgtctcaaccttttcttggcttttttaaataatacactagcgtgtaatggcatatagctactacagcgggacctctgatatattagaccagccaaggtacctaaatagaccgccttcctaccaaatattctgctgacgagttttgaactagtagaactggcagaattaagaggaagttttttttaggtacatttcttaagccgaatatttcggaggtcctaccatatatactataacgaggggttcgatatcaagaactagggctaaggcctaagagaaagtatgggatgaattgccttagatgtatattccggcttagattgtaatgatacccttctatattaagagttgctttagaaggtgtaaggtagttggtttgttcaactatataatgtatgttgtatttaatcaaattagaacgagataacagcaatttaaaacagccttactatattaggactaagttcatactagcgtgaaaatgaatgagacagaacttttgaaatggacctccgtacagagtacagagtagttaaccagttaacttcgttaggacacaattaataagcaaatgcacagataaaagtcacacgggcggtctgtaaaatgacctgtatagaaatagtatcgatgttggtttctgacattctgaaaattgtgttttagtgcctctgcacccacctcctcaatgatgtaaaaaatgctggctgtattctataatcggttccatagctcagttggttagagcgctgtgctaataacgcagatgtcgagggttcgaccccctctgggaccattcttttttgttttttgtttttcgataaatcttatcagaatgtgatagttatggctcatttaagccttaaacaggaacattggtttttgttatagtctagtggaaaatatgctgcacgattttccgtcaaatcctcttctatcagtatccatcaatcgtctttggactttgatcgatcttcccatcttctatcagcttcacctctcactttttcaaattcaacccaatggccaagcattacacgatagctcgaagctctctgttctgtactagacgtgcagcaatcaaaagcaagccacctagtagcaaggatacccctgaaaatattgacagggaaaggtcatgttttttttccccgatctactgcaaaatgaaccagcacgctgttgaataaacaaaattgaaaagatcaaaagctgagaaattcggttccgaatgaaagtgtaagcggcgcgtagactggtgttctgcttattcgaaaggaaacgatctcgttgagtcttgttgtggttgttgtatagacgacgaagttgatcaagatttgtaggggagcgtgtacattggaattataacggtatcgagttgtggaagaactatgacctaaacttggctggcgatattaaaagaagttgtcgtagtaaaaaccgagctgttgaatttcgaaggctggtcttgcacgaatggcctactttgctgactggctgaccggtacatttctctagatctggaagaaaacctcggaacagtttggcggggtagaagaagaaaaagaaggaggtatagcctgctagagctgctgaatcttgctatacgattattaatcgtggcgggcaagaagctctaaaagctattatattaactagctgtctcccactttgcaacttgcttcttcttcctctccccattttagttattctgaattcaatgcactcttcgtttgaaagacctggcatgtcacactttatacacctttttgttttcgtctgctttgcgttctaagatggatctatctctgtactgccaaaacaaccttctttatacataggagtcattatcaagataccaacgtggaggatagtatccaatcaaccttgaaaatacatttaaagatgaccgttacaagatatatcacaagttagaatggggtggcttttccacggtatagcttacgaaagacagagagtcagtttaccccatacctcatttctagctaatcttatactagccgaaatcaatgggtctccttgaaaatcattaccgtagattcgtcgctactagagctggaacatttggtaaatgtaatggcaaaatttcgaggggagctttcttcaaactatattgttcagctacttgatgccttcgtctacgaaggccctaatgggttataccaatgtcttatatttagcttaattggtcctatagtttatcagatcgtcgcggaacactacaataataacgaaaaactcgagctggaaactacgccctaaatttcgaagtagcttttgaaagctattaaatatattcatagtactattatgtatcatgaaggtcagggtacttcctcctctatagttattttctatagttagctccattttacttacgacttgttagatattagcgatcagaatactatattcagttatactaatttatctaaagagactaaggagcagctttcgatattcttagatccctaaaagttgagccgctaaaacggattgatagtatacctctaagcaataatttgcgggcccaaatagtcgagacagcagactagattagataggtagataaggattagaaaaacattcggatcctcgatttcggagagtttctatcaaggatataaacccctaaagctggcctagctgtgttcattaagggtaccagagacattcttaccgattactttgactattacatcgatttatggcatataggttatatagtatctcaatatatcatttatttaaagaaaatatactcacagcgatactaactatagatttattaattcttattcacaacctggtcattctggtattcccgaattagtttcggagacgacttattaattggtcaaatgattgggtttatagagaagttaccagctgaatagaagcctgagtaggaatcgattaggaagatacctaacgataataagccgaaagaaggtaattgaactgatccatatacagaagtactactaattttgctcgaagattatggaacctcgaagcttgaacagatgtttgctagtttagcacctggtctaacactcaaacctctacttcgtgtgatgcaaggattaacgcgattcttaccgtctactcgccttactgcagaagaggcacttgatttgctaggtgacgcccaagattaatagataaattaagcaaatagatcacacccctttattggaacattatttatttgacataaatgttaacgtagcagattgaagaatagagtaacacgttcataatcaacatctgacccaggggggcctgactttgggacccctctggccggcgcagcaatagcttccaagtcgacctttgtcatgccagggtgcagatggatatcatacgaaagtgtagttccatcgccagatggatgaagacgctgcatacccacgagtgtaacaatttttacttgtcgttgggaagtactagccgccaaatgaagcctgaccgtcagtatactatgcgacggaggaagatggaccgtgatattctgttgagaaacaagcgacgaaggcggtatatctagacagaagtccggttgtaacgacaaagaggcatgtgtaagaacccgaacgttacgaatcaaagccatccttgggtctggctcatagttagctggaagtcctgcaaatcccagtgggagtcaaaccttggcctgatcgcctcagaagcgaatccatgggcgatgaatcaaaatgcggcttgtagggagcacgtgctaacaacgggtcaacaaaggccgggagctgagcaacacttcgccaggcgatagaatgcctcccaagcgtaacatacctgaagcggaagatgaatgccgagtgacattcgaagaggcatcaacagatgcatttgggggattttgcgaagtgaacatcgtcagggcggttgcgttggtcatcgagctcagtaaaccttgcgtgctcatagaactgttctgttgttcctctgagccagatggtgtgtttgtagtgctcgacctagggctgtcaagttgccccccaagagaccatcctcggggagttctactacctgctaatccagctccgggaatatcctgcgtatggccttgggattcgtccttaaatgtgacatctgaagattgcccatcgtttttggatagtgtatcggagctctgcccaggcagtttcaaggttaacctctgcgccattaggggcacagcagtgcccacttttaatctgatgcgagacatctcaggggttccatctacctcacggggattcggaacaagctttttggcttcggcaacgcgtcggtggaagtgattctgggctccaatgttagcctgccgaaggggacggatggtaagagcgtcgcggtatcgtctcacctccaaaacccctgcgagaatagagatatcgctgtcgtcttcattgtattccctagcatttcgccatacatagctgacctcttcttcaaaggactgccacgtaggatatgcggtggttctggatgaattcttcctactgtctgtaccgcgaactctcttttggatgcttcgtaaggacacgggatgttgaataatctcatagtaatcccggtacagattccggtctggtttcccaatgaacgggtaagaaacctcctggccactaattcggggcatcagcttcaagtaaaggaccaaaatcagtgatacctactcagaatccttgagccgggtcaactcggacataatcttgtcctgtgcagcctgaagactgtcaccttcaaaatctccctcggattcgtcctgcgactccggggttcgatctgcttcctctggtggctctaaatccagatgcgacgacgcaagattggactcatcgggaatcatgagatcatcatcctatcacacgcaccgcaacttgaattagcgattgaaacatgtggcccgatttataggcgcaaagcaacgatatagcatagtgaatagagtcgaactgccggagttgtaatgtcgcgattgccctccactcgagtgtcaagggctaatcgatatgtattaatgtaacaaattggatacttacggaaacctttcggcgtttcgttctacgaaacttcatatttggggaagctgcggcagcccgtcgctttgaggtcatgtcttagtcctgataatgtcccgagtcgcgagtcgagtcacacattgaagatagcaatatgtgactgaagaccacaggagaagtggagatacagatttaataaataaagggtcaaaattgattgaacaaattacaagtagtgatagagtatggcaaaagggagatatttagacattcctcatcttagacgtgttgcagacgcgtctacggccccggggtcatcccgccttatgtaagactggtgggccacgagatatcatagtacagaatggtatcatacagtactgtaattaaatttgtatacaaacaactgcaaatctgatgtaccggcttttgcaacggtgtaattttggtaccagctacatacatagtgcatgtgactattttgagtatgatcatgtgaccaaaattggatcgacacctgaggcatcaatagtttctctcccccactattttcccgagtcccgcaaaaacaagtccggtgcttgttgttttgacaactcacatccactcctttctctgtcgcgtcacttttattctcacccgatcattcatcctccgtacctttgattccttaatatcagatcatcttgcacaaccttagggtccctacaagagcactgcgagcgtacgtttttagttgtcgctacatgcgataatcattcagccacattgtgagccgcatcctcaagctatttatttactggccttcttgttggaacaaatcgaattgacgttgacaatctatacagttgagagatccttatactgccatctcttctcatttcactatccaaatggacatcgacccagctaggcgcaacaagaagccccgtctcctcctggagacggagcgcgagaagcttgatgaatttgtggactctattcactactcggcaaggtgaggactctatggcaatgcggtagaccctccattgactctgtatagatacaacgacgacaaatttgaataccgccatgtgcagctcccaaagaatatgctcaaaaagatccccgcagactactttgacagttctaagggcactctgaaattgctttgggaggaggaatggcgagctctgggtattacacaagtatgttgaacataactgaaagatgtgcaggggttctaataatgtgtgcgcagagcttgggatgggagcattacgaggtgcatgaacctgaacctcatatcttattgttcaagtcggttatttgcgaactgttcccttagatgtatcactaaccgtcttgtaggcgccctcttaactaccaaccccctctgcaacaataagtttggcgttatgcttggaaatatgagcagttgagaagacatcgctttatgttcgtgcatggcaggcacatgggttcgcaatattgcctattagcgtccacaaaagcttcatatttgaagttctggaatgacaccaagttccattttctccttgcccgccatttcattgacacgctaaaccaggctatctctcagtctctctattatgtcatacgaaagaccaacatctgtcttgtcatagacacctggactgttctagcatgaccattaaatcgcgtttttggccagtcattctccctactaggctgtgatgaggctgctacggatgatgagcttctccacttcctgaacttgatgtgagaatctagagatatgatctcagtcaagttatcctagattgaagaatgctgtgggagagacatggacctcctctgcttggtatttctagtcgacgctagagggggaaaaaaacagaccgagtatttgcaaagggagcggatatacctggactacccattgatgtcgttggtcatttgttttccagctttaattgagtatttcgctaatggttagcaaatcaagtaacatcaagtaacttcttctctcatctatttccacgctgcctgccactttcgcccgttcgtcgcatgacgtctttgttgcgcatctaatttgtcacgctgaggggacatggcttattgccctagattgtgactggaataaggatcggttgcgctgatcaagtcagcacatggtatagggactatagtggctcggtactaatatagctagatacatatgtatatcgtaaatagctctttggaaacgtcatttcaacccaaggttggtcgactcctagtacattagacataggaagacacagatacagtattaataattcttatagccatccatggctgcttatgcataaatatagaagtagtcgcaaatttgtggtaattctttaagtcactatggaaaacacgtatgtacatcgtattcatacatagggcaaaatgctccacgcacatttcatgaacatcaagggagaccgatattgaggtgaaagttctgggtatataggatcaacttcccaatgcctcctgtctcctcatattcagatccttgagcgtcatttccactgttcgccatccacgcttggctggatcatactcgcctttcacctcgtatcgacaaaacccattaggacccttcaacccaactggacccgtgataaagaaggctccgcggtgagcagaccgtgatgcctgggcctcttcatggtgtaatcgtaatttgaatgcctctgatgccaagtgcaaatccgaccccgggccgaggtctggtaacggtagccgctgtaataaagatatgagtgaggatgggtggtagttagaattctcggtattaggcggcatattttctttgagtccgtcagtcaggggaggttgtagcttagattgatctttctggccaatccagttccttctctcatcggtaggcgcggcagaagaatcatccaacaaatcaacggcatctagcgacttccctgcgggtttcctgaaacgatcaagttgcctcagcaagagcaccagatatgcatctctgattgctaaagcaatatgaactggtttcatgaatgtctgtaacctgtcacctatctcggggtccatcggctttgcgacccacgatatactgtcgttcttgatctccaccctgtctgccgtcagtataagagccaagcttttagagattagcagtacataccccgagcgcacatatccaggaggggcacggtctggaaattgatggacaagccagaatcccgtgagggagagaggctcgccgagtatcggtgacatatgcctccccgcgttatctaaaacgattgtggcgagttcatctaaactcgtaagcgaatgatcttcaacgggttttgaatcgaatccttacccctaagcttctggagcttcttccgatccttagaaaatttcacaaactcttgccactctggatccgatgtagtgtatagctcgccttgctgcaaacgtgaccaggcaagcggaatgaataacgctccctcgttttcgacctctttcccggtgatttcgccgcttccaacggaggttcgacgcggagatgtcttctccgggttggccataggagatagatcagcatcttcggtatcgtcgtcaaatcgtatcagtacgaaggtgctccagaggtagaatgcggtgccgtacaggagacattttgatatgaacgacctgagagattctacgttagtctggctaaagagatcttgatttggcttgaaatgggcatcttacctaatccgaggccgcctaaacctcacatgtcgcacattttgtgggtttaagaagttggaatgagcgtgtgtaggaccgaagagagacgagcgtgcgtgaggacttcgaagcagatacctgagccggagcattgggaaaagccaatccctacaatgattctcactagagtatcatctcaatatgaaaaaataaggaatagatagaatccttgaagcctgatatgcacgaggatttgtgttgcgggtttgctaataatggcaaagggttcggcggtttggtggattatgtaacgtgcggcgttgcggcgtcagggagcctaccatagacgtacactacaatatatgtgtgtagataggtgatgatctctcagaatgaatagtattactaccagaataaactgtaagcttaaaatctatgacatggaccgtagcatatatcgataattggttgagcactcaatatacatactagaccacgtgatagcttagtgatatcttatcggatgccccaaagtcgtccgtagccaaatggtattctgtcctcgactccgtttgtatccaacaaaacgctagataccctcagaggagaatcttggtttgggaatcgccacatttgccaaaatagtcttgtcttacctccggccctcccgattctagcaatatgcgctgggtgtccgccttccttgccctggcattaacaggtgcactgcaagcaaatgcactggatgctacaatcttcacgtttcctcccaagactgcaacctcttcaactgctaatctccaacaacaaacaatatcagaagatgaggctcagcttgtcttagagcttcgcatgaagtcctctatagcatcggtcctcggaatggtggatgcagacaccgtgaaccgcttgaatcatttcacccaggatgatctcactctctttgggggagctactggggggatttctcttgagaaaagcttctttgttctggaagggatcgaccaggaagttggtaagtggaagcggactcacacttgacttaaaaactttagctaagatactctacagccctagccatgcaaaaagcccagcccaaccatcttcatattcctcagatttcctcaccctttatcgaatttgatctcctggaatcatttatcgaaagcagcctcactgcgaaaggggaccgtgggcaaatctgtacatactacaacgatgctaacagggctgcgtcatcgacatcccaggtagcaaagtcaactttaataatcttggggttccctcgctaatctttcaattataccagactcctaaggaatgcctatccagggaccctatttttgctgatgagtctgacatgcttgtccatgacttccttacactagttgattcagtggaatcctggataagcaaggatcacagttattcagctttgaagttgtcctttaaggtatcgagtttcccctgcctaattagtgaatgatttctgattccacgtcaccaattgcagaatgcctctggtgattctcttctcagaaccaagctcctagagacattgctccttcacttagctagaataccgtcgaccagcaaccaggaaatcacgatattggttctacccgctggtgttgaatcagaaggacttaaccgccgaggcgcgaagcaatcatcggcaccagtcacccatcccttcagaaggtcggcaccgctgcagtcaaccctagcgcctgtctgtcatgcttcgaactcttcgtgtgccgaatcaaccaatgactgttccggacacggttcctgctatctgaaatacggctcgggtgttgagggaactacaggcaattgttatgcatgccaatgcagacaaagtgttgttcagaatagcgatggtaccaccaagacagttcaatggggtggatcggcttgccagaaaagagacattagctcacctttcttcctcgttgcaggcgtcagtctgcttgccatcgttctagttgggagtgcgattgggatgcttttcagtatgggctcacaggagctacccagtgtcatcagcgctggtgtaggaggccctaagtctcagatgtgagcataggggaagctgtgtaggtgttagggtgtgtttttcctcttttctttttttcttggccgagggcttcatgttctttacctcattcatccctcaacctttaagcaaaaaattttgctttactttgtttctaattgccccttccctaccctgcgtctgagggaaactttcggtcaatacagcagtacatatatgtaaggtggcacaatctatttataaggggcacgcggctatagcaaaagaatatattgtatagcatgtacaaaatagtactctctgtatgtattcgagtaatgcgcaccaagagatatatagatatgcataacccattcagcctgctaaatggactaagaatcggggggaagcagtggctgccagtagcgccgtaggacaagagggagacaagacaattcgtgaatcatcagccgcaagaataaaaggtccccatgatccagacgcgccctagtccagttgcgcaaagatcgataaattacacatatcaagtcataaacaaggaaaatataactccagcccacattccagatgtggttccggcatgaaaatgagttgcagattagtcaaatcgcgaagagttatgagaaggatagcactcaaagaccaatcatgtggtaccagcttcgacttgacgaggtgtgcgtctttccgaaggcagtggatccacagaagccccaactagaggtggtcttcttgaggagggaaaatggaaggaaagttggcggagtcgagtaggaatcaatcgagaccaggtggattgacccgatgaacccgaggcatggggtgggtcccaaggctgatcacgcctactctgtacatgctgttctcggtttggagatacgcttctttcctctggagatgtcgattggaatattcggctaggcaagcccatctggcctctgaatccgcttgccctgccaccattccaagcaactcgagggggtctgaggattgcatccgggtggttcgaggctgtacgacgaccctgacgatctgtgacagactgtgcttcggtctgtgcacggggtttggggacatagtaatcggccttgcatagagggcaacatgcccttctgctagtaagccaggggtcgacgcatgaagcatggaaagcatggccacaagtaagtccccggatatcatcatcgtcctcaatgatatctaggcaaatcgcacaagaatcgccagggttgggcagaagatcagcagtaacagcattaccaatgtaggcaccttcatcatgttccccaatatccgtggtcatgttttcattggtcaaggaatgctgccatttctctttctgtatacctgcaccagtggactgccggttggaaggctttgaagatactgcagggcccttctccgaagtctgcaccagagggccatcttgtacctcttgaatggggggtggtaaggtatcaacggaatccacccgtacatggcccttggtagacggtgatattgcagccgtgtgaaccccaaccgcctttgtcacgatatcactttcatcctttaggctctgtggcctgctatttggggctgtgatacctccttctgttgaaaggccctggttggcgcgagatgatctccacactttgtacttgacaagtgggaaccgcccgttgacttcatccatcgtcattagccttttttcccttcgcctgcgatgagttcgtggcatggtgaccaagtctatgggctctcctacttcttcactgcggagttgacgatttcgttggttatatcgaaagcagtatttgactccaacaatgatcctgcgatgaccgtcagatgccatccctgaaacactgggaggctggcctgttggcctgggcagggggtatatgaagcaacgtaccatagatttgtaaacacaacaccaaacccaagagcgacgaagaacaataaaggtgagcttgtagcattattcgaactcgaaccctctccgtcgctactagcagtggtggtggcagcagcactactagaggctgatgttggcgttgaagacattccaaccgaaattcgatacgaaaaggatctcactcggaacgttggcgctcggattattgttggagtctcagttgcccaaagttcgatccttcatgccttgagttgtgtgtacagggcaaccctgtatgtaagtttgggtaagactccagcagattaagtccaaggcgacgagaacgtggacgggaatgatccaggttatgtaccctatgtgatagactggatatttggagattaaacctgatggtctgtcatggatgattgaccgtaagcagagcacacagaacttcctacgaagagaaggtgaatgccgagggtcggtgtcatatcattatcaatagcaagagcagaaggaacctggaggtaaagagaaagaagaggaagaggaagcgagatagagagataaagagatagatagagagaaagtggatcagggcaggacggaggccttttgatttctgggatgcatgcggatcgagactcgacacctgaggctgtgaatcacgggactgccttactgtaaggtacatccacatttgaaggggggatgagaccagggctatttacctgccccctttctttctttttctatttgaagatgatattattacatacctggctaccttcaagggtacatataagctcgtatgcatatgtacactactctatgaatcagtatagctatatgtaatgtagtatggatacagtacaatatatatgatatactactatacacacaatgtgtaatcaattcactactagttctttagattgaattatacggtaagagtggcttacattaatgtgttggttttgtgggaaagcccaattagccgaccacttacccctcgtaaagtgaaacaagaaagatgtcctatatagacatacatatataatataatgtagttatatgctggaaatatggtcaatatcaaagtttcacacggctgctacaccgctccgtacttcccgaaacctctagttcggagatctatgaactctccccttcatcacatctgcacaccccaagtctcattatggctgaacccaatccagtggttttctttgatattgcccttggaggtaagtcaatttagttattttcatgtcggctctagtgtgcggcatcggagtacatagtctggcatggcgaactctgctaagtaatataatccatacaggcgagtctctaggtcgagtgaaaatggagttgttcgccaatgtcactccacgaactgcggagaatttccgccaattctgcaccggcgagagcaaaaaccccaagggacagcctcagggctacaagggaagcaaatttcaccgagtggtatgtgatgaagatccttggatggcgatgcggaattaatgctcattgtagatcaaagacttcatgatccagggtggagatttcatcaatggcgatgggactgggtcatgtactatctatggcacctcgaaatttgccgatgaaaatttcactctcacacatgaccgtgccgggttattaagtatggctgtaagtctgaatctcgagaccgagggggatgtttaccccgaaaggatctttttactaataccagcagaattcgggcccagacaccaatggttgccaattctttataacaaccacagccacaccattcttgaacaacaagcatgtggtcttcggccaggtgattgatgggatagatatcgttaaaatgcttgaacacacccgtaccaccaaagacaagcccaaccaagacgtgacgattgtgcaatgtggagagatgtaataataattacaatagcaaacacgtcctacaaatccatagctcctagaattgcaggaaaataatttgaatcgtgggaaatatatcaatttcatatggctttagtaaccagggctcttctgatattccatagtgggcacagacgtgatataaaaaaaagtaacttcacagaatcccgtcctcaggtctagagcttgaatttattcagataatccgcagccagtgagatagcctcctcgaccttgtcagcgttggtaccgttaccaatggaggtaggtccttttcctcctgcttttcctccaacggcgccagagacgacggccgcccagtcacttgccgaagcaccttggtcactcagtgcctgtgtccgaattagtataagaatccatatgtagtaatattctaccatttgatttcccaaatgcaagaagggtagggctgatgtgttctcttactcacctgagagatgtaacatccgtgtgaaacccggccttgttcagagtcggccgccaatagataaacactcttaccctgcatcttggacttgacatggttgagagattcactgacagccttggcattggcagaaatcggaagctggaccacaagccacgacttgtcttggttttcaggagcctcgaaataggaggtgatagcgtcgacggctttcttcgattccagtttttgttgggccttttgatcatcgagaacttgcttattgatcttggcaaaccgttcgcggaacttggccttgcggacggcggagattgcaagctggttgagatccacctgaacttgcttagcctcctgctccttttcagagcccaaaggcaatgcatccagccgatcaaggcgctgtccgaattcctcggcaactctctgcacctcatgtgcatcctctccagtgacggcaataattcggcgaattcccttggcaatgccactctcctccaggatgatcaaatccttgatatcgcctgtcttctgcacatgtgttccaccgcagaactcaatgctgacttcctgccaacggggatctttgacattctgcaggatctcctccaattccacaccgacagagacaacacgaacaggatcagggtaagtctcgccgaatacggccctgacgccagaaatttgctgggcagtggcgagcggaagttcttgggagtagacagcacagttttgtcggatataatcagtcgccttggcttcgatcttctcaagctcggcgtcagagattgcgctcttgtgggagaagtcaaacctaagcttctcggcggccaccagggaacccttttgatcaacaccatcgcctaggatttccttcagagcgaaattcagtatatgggttccggtgtggttatttcggatgggccagcgtcggagctcatcatactcgcaaatgacagaattgccgacactgaatgatccgtatttcatgaagccggtgtgtaaaacgtatccggcgtaagactgtacatcgccaacttcaagctccgcttgtccgtcgatgattattttgccggtatcattttcctgaccaccctgttcggcatagaagttcgtacggtcgagaatgacgccaagctgtgccccctcaggaacatcgtcagtgctattgtgaaaagttttcccgtggtaaatagccttaacgtgagaagtgatattaccccggccgaatttaggcgaatcatccgttttttgtacgtcgttcattttctccaggttgcctaggtcatggacatcaagcttaactgtgttatcagcagccttcttttgacccttactagcttcctttgccttcaagcgagcctcttcaaattcgacatcatcaatgcggagaccacgttcctcggccatgattcgagttaggtcaacagggaagccaaaggtatcgtacagtctccaaacatcagcgccatggagcatatcggtgcccttggctttagcatgttgggcatattgctcaaattggcgctcacctctatccaaggtcttggcaaatgacaactcttcctcgtctaagatttcgatgacatcttgctgcttgcgcttgagttcagggaacatttcacccaactgatccacaacagtcggcactagcttagcgaagaaattcccaatatcgacctggaaatatttccgcgcataccgagctcctcggcgtaggacacggcgaatcacatagccacggccctcgttgttgggaatgactccatccgagatagcgaacatcaaagtccgcacgtggtctgcaataacacggtaggcggtgtcaattccatcggcatcgtcggcgccaaagtggccgcggtattccctggccccagtggcattctggatagcctggaatataggagtgaagacatcggtatcgtagttggaaggtttgtcctggagaattgataccagtcgctcgaagcccattccagtgtcaacatgtttgttgggaaggggtctcaaggagctatccggctcgcggttatattggatgaagacgttgttccagatttccagcacatttgggtcgtcttcgttgacgagatgagcagcgttgcgtccaccgatccgatcgtagtgcacttcactacaaggtccacatgggccctggtcacccatttcccagaagttgtctttcatgtctccaggaaggatgtgagattcaggaacgcccaccgatttccatatttctttggcttccagatccggttccaatccaccagcttcattgccctcaaaataagtaacgtagaggcgatcgggatctagcccatagacttccgtcaacagggtccacgaataagtgatagcttctttcttgaagtagtcgccaaaactccagttgccgagcatctcaaagaaggtctagagactttgtcagcacttcttctggtgaatgatagaaagcgagtttctatactgacatggtgatagctatctttgccaacatcatccagatcctgtgtcaggttagtcagtgtaccataagaccctcttaaagtttatcaaggcacacccacgttatgttttccaccggcacggagacactatccagttgtatcagcaacagtcccaagtcggatgtactggtgagtgtgaattatccaataccttttgcgagttcgttgcgcgtttcatctttccaaagtctgatgaggcgtcaacggtgcccaggaagatggacttgaactggttcattcccgcattggtgaaaagaagagtcggatctgacagaggagcgacgggggaagaagggactgtatacaagaataacttcaggtcagtccatgtcgttggcgggggtggaggggtaggcaaaaaaagaagaagaatgggctcaacgcaccgaatgtatggccattttgtttaaaataatctagaaaggtgtctcggactcgttgagcagtccattctggaccgagagaagtcatcctgtcgaatgtgggatgcttggttgacagggagtgaacaaggcaaggaaagaatgttctgggttgatttctgcgaaagagatgagtcaaagcccgttccccgttcgtcaccaccccagaaacccgcatcgagcaacgaaatgcacttgaccccagatctgtgcacttagaagttcaaacgcttttctttccttttcttcttctttaattattaaccccacacttccaaacactcgcaagagaaggagagagagatagaaagtgtggatggcgggtgaggaaaatcacgggaagaagcgcccggccgaagctgaccccgacggcgcgcaaccgttaacgaagagatttggacacctccgaataggtaggcaattgaacttgaaagagttgtggaagttgtcaagttaacatatttgtagaaaataacgtgccaatctccgctcgggccaaacccaaggggcatatccaacatatccagcctatccagcctcacattgaccaatatgaccaacataatcaacataaccaacgtaaccaagacctatcctcctcaaacgatgcaatgatcttggacgacaccaaacatacgacctacattcacaacctggatcaagaattaatggaagccgactctcctggcttggtgttttcaccattcgcagagaaagtgctctcagtccctcaatccgttctatccgactcgaagccctcggggaaagaactcgttctttatacggaaccatcttccctcacggttcccaaggaaaaggataatgttcgaaaggcaattcttgaatctcgagcgcgagctagagagaacaaggttacggaagatttatacgatgatccaatggatattgatagttaaaagtaattagggatagggaatgtataaacttgtacctttaggcatacaaatgtacgtgatctacatggtagtacatgggtgtactggactctacggagtacatatccaagtagttatcagattgcatacccgtatgtaaattaccgatcccctgtaatttaccgtaaccggactcacgtgactcaccgctcccgaaaaattttctggtttttttgtgtggctccgactaaatatgcactcggcttgataaaaaaaatttcctctctcccccaccatccctcttcccatccctccctcaaaatcacatctacaatttcataatggccgattctgaggtttacgacggtgccgtcggcatcgatcttggtacgtttttgctctactaaattcgaccgcacagctgctaattgccttttttctttttcttcaggcactacctactcttgtgttgccaactacgagggcaccaatgtcgagatcagtacgcttcccccctccaaatattcgatctttctctcgaatactgactatttgatcagttgccaacgaccagggtagctacactaccccctccttcgtctctttcaccgacaaggagcgtctgattggtgatgccgccaagaaccaggccgctatgaaccctgccaacactgttttcgatatcaagtgagttgaaaaaaaaaaacataaaaaaaacctcgcgcagcctatcaattcgcgatatgcgcattctccacaattccaaattcgttctgactctaatggaacaggcgtctgatcggtcgccgcttcgatgaccccattgtcaagaaggatgttgagtcctggcccttcaaggtcatcgaccagggtggcaaccccgttgtccaggttgagtaccttaacgagaccaagaccttctctccccaggagatctcctccatggtcctcatgaaggtatggcgaaatgtatatctcatatttgttggatttgtttgctgactatttgggccagatgaaagaggtcgctgagatcaagctcggcaagaaggttgagaaggctgtgatcaccgtgcccgcctacttcaacgacaaccagcgtcaggccaccaaggatgccggtgccatcgctggcctgaacgttctccgtatcatcaacgagcctactgctgccgctatcgcctacggtctcggcgccggcaagtctgagaaggagcgcaacgtcctcatctacgatctcggtggtggtaccttcgatgtctccctgttgaacatccagggtggtgtcttcactgttaaggctaccgctggtgacactcaccttggtggtcaggatttcgatactaacctccttgaccacttcaagaaggagttccagcgtaagactggcaaggatctctccggtgatgcacgtgctctccgtcgtcttcgcactgcttgcgagcgtgctaagcgtaccctgtccaacgctacccagaccaccgtcgagattgactctctcttcgacggtgaggacctcaactcctccatcactcgcgcccgtttcgaggacctcaacgccaaggctttctctggaaccctcgagcccgtccagcaggtccttaaggattctggcatgcctaagaacaaggttgacgagatcgtccttgttggtggctccacccgtattcctcgtatccagaagctcctgagcgacttcttcgatggcaagaagctcgagaaggtaagacaagacagcactacttgatctaacgtcaaagccagttacttatcttttttccaatagagcatcaaccccgatgaggctgttgcctacggtgctgccgttcaggccggtatcctctccggcaaggccacctcggctgagaccgctgacctgctcctccttgacgttgttcctctttcccttggtgttgccatggagggtaacattttcgcccccgttgtcaaccgtggccagactgtccccactatcaagaagcgcaccttcaccactgttgtcgataaccagagcactgtccagttccccgtctaccagggtgagcgtaccaactgtgctgacaacacctccctgggagagttcactcttgctccccttcctcccatgcgcgccggtgaggccgccctcgagtgtgtcttcgaggttgacgtcaacggtatcctgaaggtcaccgccactgagaagacctctggccgcactgccaacatcactatctccaacgctgttggcaagctttccagctccgagatcgaccagatggttgacggtatgtttctcccactaacactaatatttttgactatatgctgacttgacaatctgtagacgctgccaagttcaagaccagcgatgaggctttcaccaagcgcttcgagtctcgccagcagctcgagtcttacatctcccgtgtcgaggagattgtctctgaccccggtatgtccatgaagctcaagcgcggcaacaaggagcgcattgagtccgctctcagcgacgccatggcccagctcgaggttgaggactccacccccgaggacctcaagaagaaggagcttgctcttaagcgtctgattaccaaggccatggctacacggtaaatgcatacatgggaagacatgaacatagacttatggccaacgaatttttcctctttcccgggactctgcttctcagggaatctgcgccatgtagaccttgggcagggttggtctctgtcgcgctttgtttatgaagccgggcaacttgggcgcagttttcttttcttgaaaagtatgatttgatttgttttttgtagacgaagttcgccatctgcaatttaatgacattgtgatgatctcctctcattgtaatacttggaataccgggtagttctacatggtaatatagtgtatgatatttttggcctcgaggcggaagcgcgggggtaacgtgagagatacttctggactgcgcacctccgccctggaactttttacaacaatcgcttccaccatgcaacgcattatagcccaatcaattcgctcctcttgtcctcgtcttgtggaacaccctcaaacgactcgatctttatgtcttctaccccgagcccagcgcgccgttcctctgaaccggcgtgagtttgccaactcgcctgccttgtacaagaaaaaggacaaggccaagaaagcttccgcttccgcttccgcttctgagccagaggaaagctccagtgctccttctgaagatccctttgatctttcccaattgcacaatggcatctccacggctgttgctcggctaaaagatgatctgtccaagcttcgcgcaggagggcggttcaataccgcagtcctagagagtttgagggtccatctgagcaaagacagcaaagattcggtcaaattgggagatctggcgcaggttgtgccgaagggtggacgcatgattactcttttggcagccgaggaggatgtaagttcatgatgccttgttagggcgtgagcctgctattgctgtcccaacgagccaactctaatacatttcgagcagcacttgaaacctcttacttcagcgatcgtctcctcaaacctctccttgacccctcagcccgatcctcacaacgccctccagctcaacattcctattccgccacctacaaaagaatctcgggacaagaacgttcaagccgccaagcaagcattcgaaaaggctgccggtttagtacgtgactctagaggtgccatgcataaacgtcttcaggatatgcagaagaagaaattagctcggccagatgacgtgcgcaaagctcacgatcagatggagaagattacagaccagggtcaaaaggaggcgaaggatgcattcgaaggtgccaagaagacattggaacaggcctaagccaggaaaataatgagaatcataacatatggcatggcaatggccgattgtaaaaaagactttgtaaatctaggtacagacagaggcataattggggaagatatggggaggatatgggaagaacagaggaaaacccgatcaacgaaataaatataatacaaatcacttctagcacttagttcacatatcctcagacactcttggtcttgcggccagcagaaacaagagattcaattttggccatgaactgcgaggtcttcccggttgtctggtaggtcccgttgttccggaggttcttcaacacctctcccaatacggcatgcccatctttcccgacttcagacgtggggtagtttccctgaacgaacgtttccatgagagacttggtgctttctgcgtcgatgggactaaactcgacattccgtggctccacaaggtcacccttgcgctgtgaaattcgatcggcacgaagctgagccaatcgcttggtctcttccaaagcctccgccttctcgttctcattgttgaaaagaacgctctggcccttccacaggcgccttccaagctcatagggcgggatatagccgttggcaatgcggccgcccaggctggaaagcttttcgtagacggcagccgagcgcgagttcacgtctgtaggaattgaaggccatgtctctttcaaagtagagtagctgatctcctgaggctcataacgaataggcgttggcctggatttgatgatttgctcttgaagaatttgatcaatagccgccgcttcgccatcttcgccgtcgtcattctcaggggtttttgcgttcctgcgcggcccatttcggttacccttggcgcctttggcgaagggtttaggtttgcgattttgaggttgattgccgcctcgaatgtcgcgtgatctcgggctgcggataatcttaggttgctctccaccgctagctcgtgcggctgcaaaagatctagcgtcaatcactcgaggaggacgagtttgatactggttggtgcgagctggcgggccattgggattgcgaggccggtaggaaagcgtggccgatgaagagcggggattgggtttacggttgtctaatgggcttatgttagaattcaaattccagatggccgaaatagttgcgctactgcatttattttgcccagtgcggcttcccttggatgtacctaccggatggctgggctcgattttcggcggccactgtacgagtacaggagaactggcgagcaggtgtagaaagaccgagttttgtccgttcacagtgcagcgagatctgcctcagctgtggccgaaacatgttgtattctgaatgaactaggtcgtgtccctagaacgttttggtaaagagacgcggaaagattgaacgaataattgcagtcacgtgaggcaccgccttcctgcccgctccaagtaaacgcagccaagtcttcctttggttcattgcaatacctttcgactgtcaaaatgcttcgtcgaaagccaacggctattgctattacttctgaggacattgctgcctttgaagaagctagacttcgcaaactgtctgaagaaaacaaacacccagaacagcacgcaaaggcaacctccaatgtcaacatcgaccccagtgatgagctgaaaccacttccaggtgacaaggctaggattgtccgaacccgtgaagaaagaataggcattagtcgacgtggttgactgtctacaccacgatctcgaacccctagaccaccattgcatgttggaaggacttgttccacaccatgacatttggatatgaggtacataacccaattttgatatgcttgcatgtatttcttgccctttgaaacattgaattctcttttcgtcacatcattcaccattaacaagaaacaaatagtgcaggatctttggcgttgaggatatgacagtctcatacataacacacccaccatcttgcttgtatgaaagcgtatgacagagagtgatcgagcagtcatagagcgtggtttttttttttttgagcatcagatcacggcattcctctgatatatcaatctaaatatgccaacatatctcaccatttcccctatggttacctattggctaggacgttggtttaaccccagagaagcggaatggtacattggaatatcttgttaataaaacaacacaatgcatactactttgttcatctagatcacctccatcgggcatcttggaaaggaccaatcctttaagtgacctctctcttttggcctatttcgagatatgtttgttctgatcagaggctttagcttgaaaatagacacaaagcatcaaaaatattgacgagcgaggatgacccgagaatccatctcgtatagaacaagagtatttcaccactcctccgcccaatctgaatagtgtcttttccacgggtatcaattattttctaaatgtagtctactaaatagaccaattcatgtaagctgatgatgtatagcagggttcaggcatcaactactatcctagccggtgagatatcatgatggttggacgtgtctacctcaaacttttcctcattgagccatgcttatgtcccttggcggttgtgacgtgataaagaaaaacagagcaagatcgcacaaaaaagaaaaaaagaaaatagggatatagagtgataatagcaatggttgcctgggatacttaaacaagaacccgcaggccgtaaaatctggcgactgaattggagaaaaacaaggtcgtagatgatttgggtatatgtgcgtctcatcctctttggcgcttggacatattgtcggaggtaacatcaactgggtaattccaccggcgtttcagcccttgtggatcatacacactagcaacactttgttgccagtctcgcgctgaaaacacaacagggggtacctggaactgaggaggcgagagagactgggtagacgtgacagagggcactttgttaggtgtctcgtactggatggggtattgggagttcataacattttgtacacctggcactgaattgtttatagccattggcggggagtttgcgctgacggtagaggggttcacggagaaggccatatcccattgactagagcgaaggatcagtaagagaccaagcagaaggtgaatcatttacgtacgtgataattcgggtcggatcccagtggtcttcatcgaccgacggggcatctagaggatgagttgtttgaggctgatgggcaaccattccgagggattgtatctgagaagatgtgtcggacttcgagtcttcagcatcagtcgagatcggaggggttaccggaagcggattgtaacgcactctagattggagttgactcaagtgcggatgatagtgtgcatccataggtggactgggatggtagggttccgaaggactcccgtatgggaaactgggcttcaactcgaaaggacgatgcatgtcggcggagaaagccagcctcaatgaatcgatttgagcttgaatctcaggcatgggccaggctgtggagcacgtctctagaattctcatatgacgggtgaagaattcacgggcatctgaattgaactcagggtcgggggaggtaattgcaacctgctcgcattagaatgggtttgctatgaaaaaaagaagaaagtcccataaattgttgaatacttaccaggtgcagcatcgtacaagtcaggatacaatatatggcaaaattgatgcctctttgcatgtaaagtaggccagatagcccgaatctttgcaagatagcttcttgtagtcgacagaggctttttgccgaggagtagcatagtgacatatgagtcttccattcaccaccggccgcaaaagattgagaagcgaagagttgagggcgatgtaacataataatggcgagatggcaatgggaatgcatattgcccacaaaatgggatggaagccacggtggggagccatcggcaggataattgacctgcaggtctggaggaaggttacgaagccattctgcgaaaagcgggttgatttgtacgaatcgggcatctgcgccccagtccttttgcttcttaactttgtgatagatatctgtgatgatgcggatgtgatgtgcgttgcgaacgaaataggcgtattgtcttgagcggtcgatctcataatgatcgagacctctgatgtctagcgtcggacgcatgtccaccgtctcaggatcaacaccgtaatccgaacggcctactttgatcagaagctggttgatttaataaaggatgcgacggagtagacttaccttggggcccaccgatcatcacctcaaccaccaaaagagcctgccacactctggtgtgcaccaagcattcgattggtccgagttcacagggcttgccatcggcgtgattgctgtaatgttcatgaatgtccaaatctttcgccattgagacaatcgtcttaacagtctgccaggatcgataatagtatcctttcttcggcaaagattcccttgcttttagtagcagaattaatgcttggatagtactcagacgtggtacatccatgaagctagtctcgtgtcctatgaaacgtcagtcttttgaagatggctggacgaatatcaagtatcgactcacggttagccaaagcaagccactgagcgccttctgcaggttcatcagataaacggcccgcgcaggcaaaaagggcctcgagaaggagaggagagatagaatggcgatcatgctgccattgatagtacagatgggcacgagatacgacaggaacatagggatgtatttcatcaaagtagatcttgaaataagccataacgtcgtcttcggcaggcatgagctcaggggggattcgaatcgtcacgcccgatcccgttctgagaggtggaaattgctcttcaacgtcgtcttggacaggggcgtcgggctcaattcgatcggtgcgttgccttctaatgtatggggctatcgaaggtagagtgttagcggggaaatccgtagaacgggtaatgatgccataccaatcccactctcgtcaatcttcaactccccaagtacatcactgaggttttctgcagttgactgatcgttatcaatatacacattccgatccgatggacccatggacgaagtttgcggccccggaaacatttgagactgttggaaagtctggtgtgacattgtcatttgtggtgactgaagatcgttgtagatgttgggttgagcctgaggagggacgaattgggaatacatgctcatgtgatcatatgaggggatagtattcatggttggttgactgttgtccttgaagaccggagctgctggaaatgtatgagaaccctcggctgcggcggaggggcctccggtctctagagtcgactcgccctggccatcagggagaaagtccccatcttgcccgatggtcggagggacacagactagctttagacgagtgcatgcagaacaaggccatgtatttgtcgtagccgcatcacatttgattttccttttccggcaaccgttacaggctcgcatcactaaacgtcaggcttgtcagtatgtttttgttgacttgcgatggacacttttcctacccttcagcctcttatgtcggttatgctcatcaacgaacacatagtctacaccgatgaatggttagttgtcaatgaaatgtgtaagggatagatggtgcttgagggtcatacttttctggccttctctcggggggcccgttgggggcgcaaatgaataaccttgcatgcttgcccgtttgataacaagtgtcgggtttgtaaaatggcgtagactgtgatgatagaggcaactcaagttggtattgggactatcagggtatcaagaaaggaaaacaaaaactgtgctgggaggcctatccacaaggacctgcctcgggaaattgaaggagtgagagaaggtggaggtcgaacctcgctctgcgagatggatcgaactgcaccaagagacgataaggcaggatggtggaatctgtgggagtagtcgaggcgcaagcggattaatcggggcagacaacggctatggttgcaacaaattctagagacgttgctcaatgacagatttcaggttgtcccaatgttgcgaccaacttgctgaggcttcgcgggaaattgaccggcagcagtcgccaaagtcccgagacgtgcaagtgtcctgcgaggctgttatgggttgggagatttgcgctctcgtatatcaagcgcgtggggctagacacggaaacaagatcaggccgtctttggtctcgaatgtatgtaatgaacaaatagtcgaatgctgtcataagtaccgggcagattagcgtcggttcccacacatatgatccagatcaaataaaatcacacagaaaaacattgagagtacccccgaggcagctgcttacgattcaggtaaatagaagggtttcgggtgcatatccatcgatgtcaatgtcgcaaagtactccgcattcgaatcaacgagcctggcgcattgcatctcagtagggaagaagcggaagaagcgcagagcattaggaagagcagcaacgcaggttcacaggtggaggcatagagacattggcgaataggctgtagtagttcaagaatccccggggagaaaaaagaaaaggggaaaattcgagcttgttgtgagagagggagggagggagagagaaggtcagaagctgaggggtgggaggtaccgcgggtgccaagtgtggaagaggatccaatagcgcccgccgctgtggatttagggtggaggggcgatccggactggtgattttctatattttctgtttatgaggtagcttatggagatctagggctggatttattctggcagagacatcgaggaattattccagtggattgtcgcgtataacatactacgtacacctatataaggtagggttatatagcggttgatgaatcagggatgagggagtctccacttaggagcgatactgttaccttagtgaatcagtagtaagttttatgctagttgactactattacaataattatcattatgtacgtggttatatagagtgccgggtatacggagtacctagtacctagtacctaggtacatatgtacacctgtaacatatgtacctataactatatgtagtgattcaattagggaaaaagcaatccaagaataaacacaagtgaatctttctgaaacagccccaattattcgggaaaaagacacgttctgtgaaactcgagaatcagccaaaactgccgtgacttcggacacataatgagtttaaagccaaactcggcctgtcgatcagccgcggggattgtcaggttacatacggacggagtaactttagccctattctgagggatagagtgggattactaatgatgtattaagattactaatgatatactaatccagacaatataacggagtagttaagtagagttatcatggatattccaattaaaactctggcaaattagatatgctgctcatcaaatccctcaaaatatagaatcccttttcacagactgtccccaggtactccatactccatacgccgtacgcggagtcatccagtactcgcacgtggacaggataagctggtaaacgttatcgccgcaatttttaccctcaacacactacctctactcgaccacagaccacattacccctacccctcgttcatcatggcggaaatgcaaaattcaaaccccacgatcctcaatgccgctgatctccccacgcggttgcgacccaccaccactcgaaagtccgaatatggtggtatctttacatcggccctgcccctcgccccagtagacttcgagagtcctccgtcatcggactcggaggatgacaacctactagaggagcctattgatgaacaggaaatatatggtaagcctctctctcacatatctctcccaggaaaagaaaaagcccatatgtccgagatgattggcctagctcaagtccactaaaaccgtcagatctcatctcgtcaatctccgatccggaacaccccatctcactcggtgaattagccgtggtctctctcccagatatcatgatcaagccaaccctccctgacgtccctgattcgcctcttcaaactgtcaccgtgctgatcacgcccacaatcactcactgcagtctggcaaccgtcatcggtcttggcgtccgtgttcgtctggaacaatctctcccctccagattcaggatggatgtgcgtattaaggaaggtacacatagcaccggggacgaagttaataagcagctcgccgataaggagcgtgttgctgcggccttggagaatggtgcgttgatgggggtcattgccaaaatgatggagacctgccactgaaatttcaaataccctttgtatactataagccgggtcctcgaggtaacgagctatcactggcagatagaccaggccctcttgtgtgacgaccgcctacgatgaatgactcttccggatttttaaatgacttgcattggaatgagtattagaagtacatatgaactttgataccaccataagattgatcaaaccggatcaaaggactcctcctgtagccaaccctatttcgagtagtgaaattttttgaggtcatgagtctagcacgccactttccttcaaacccttccaaagctccggctccaaaaacttactcacagtaacatcctcggccaggcccttgcgtctccgtgttttcaagacaaagtcacgcgcagtagccatggcaggagccatctccaagggcttgagcttgatatcacggtccagtggatcaccaggaaccacactccacttatcgaagacaaggtttaccatagcctgaccttgtgtgtgaattcgaagatcggtctcaaatccaaacgagtcaatcactgggatcaaaccgcgtacggagtaaagaggagttcccgcaatgggaccatccgacaggacgtgacctcttcggcgcgacaagactgtgtacaccgaagccacggagtctgcaggtcctgtcattgtgacagagtagatcggttccatgagacgcggagatgccataaggaacgacgagtatacagcacgacgggctgtagggatgatctggcctccaccgcggtagatagcttgatcggccagggacacgtccgtgagcctaaactttgtgtttcgaatggctgaacttcaattagtctcacattcgtcatatgcgaatgagaagggggaaagaaaacttacgttcttcacaaagagggccttctcgtgtaccccagctgaagccttgggtgatagagtccctgacagtaccgagaagtttcttatccacttgagagggtaaagtgtcatcttggagtatgttgggacccatttcatccggtccaaacgcccagatgcttcgcgctgcaagcttatcccaatcgtaattttcttcaaagtatcgagcaaccttccgaatagggtccttgatactgactttaccactttcaatatcctctgcaatcccatcatctaaaggctccgcaatcatcgtgattttattcttcttattcggagtgattgagtaacacatgatggcagaggtttccaccacagtctcacagaaacgtgtaacggggtcggagaccttgatctccatctccgagtatagtttccggaggtcatggagcacacagtccatgtaaagctcgccggttcctagaaccacatgctcgccagactcctcaactttggttgagatgagggggtagctcttgttaattttccgcaatccatccaacattttgggaagttcggatggattgaccggctcaacggcgaccttgaacactgattcggtcatgtgacgaatcgggcggaagatgtacacatcctcgtcatcttcaagcttaaggggtaccagcgtcgcagtcttcacaatggagttgtcgacaccacccaaaagaacccaatttccggcggggacaccgttggtcaggatgttgtaacgcgtttccgcgatccacgtgtcggagatggttgctaccaccatgtcttcttcatcttctggcgtgtagccctcgccgagtacacggacctgctgaccaggccgcgctgtgccactcataattcttccaaaagagtagaagcttgcggcatcagtactgctgaagagtttggtaacatgtattaccaacggtccgttttgatcacaagcgagcatcgaggccccaattttggtatccacgggcccagtgtagtatcgctccaggaacctttgggcaccttccaccggggaaggaacgtgttgaacaaccatatccacgaagccagtggccggcccgaagaaattctcacagactagactgagcagctccttggcatcaatcttgagctgagatggcttcaaattgacgccgacgctagccagagtctgtttcaaatcctcgggactctcgctaagtgtgtgggagtagagtttgtagatcggctccaagacaaacttgacgaatgaccgctttgcgttctcctccactcctttgcgagtgaactttcggctctggggattgtagaagatgtcaccccaaagtcgcgcggcaaattctgtcgagtccaagctcggataactgtctgcgtacatcctggcaaatgactgcaatgtaaagcaccagttcattgagcttgatgcgaatccaacattgcccttctcggggctcagtcggagtcgctcgccttggcctggcaaaacgttctcaataatcgtattgacctcttcgatcacatgcttcaatttgaaataggcatcattgggaggaagtttgagctccagaataagtcgatccatcttgttgactaccaaggtcaaggggagaccttccaatactgcatgcttgataatttgctcagtgttcgcctggacaccctcgacaacatccacaactaataccgcaccatcagctaggcggatagaggcagccacctcatcaacaaaattcacatgcccgggggtatcaaggaggttgagcaggtgagatttgcctttggtgcttggaagaacgagactcatcggtgccgatttgattgagagaccgcgttctctctctaggaaatgaacgtctgtgtatcgcagttgttcttctctcttgcgtcctgtgcgcttgtccagccgctctgttaggtcgtgtgtctgtttgaccaacatatccatgaaagcggtctttccatgatgcaggtgaccgacgattgcaacgtttcttatctgtgatgggaaactcaagagatctgacatgaactcccgggaaaagtatacaggtgggagttcggtctctgcgatcgcaaatttcttctgctggacgggggcaatgatgggctccgacaatggctgagcatcttcctcctggaccatggtttcaacatcctcgccgtagacttgttgtgcgctggggtagtattgcttgtcttcgtgcaagatgaccgcatttgaaggaccctctagacgtgagattagtgagattgcaggctttgaagaagacatattgacataccatcaacttccatcaactgtagatcatttatctcctcttcttcttcatcgtcaaaagcctcatcgaacttaaaggcttgaggttggacatcttcatggtgctcctcgtccgattccgcatcgccgatgtagttaccaaatctaggcacaattagcaaggctccagatttagagagtcaaaagaaacatactcatcatagaggtcatccataatgaatcgtagagaacgcgagcgtgtgaggtaaaaaaaagagggacccgtagctccagacgcgtgatgccggaggatctcaactttcacctggtccgagcgtctcttcggagtactcgtgcctacaccgtacagctcctcactccccaccatataatttactcttatagatgcccctccctctttgatcttttggatctttctttacttctctaaaatcctctctacttctgtatactcttccggtcttccctacttccaccaccttttctttctccaaaatgtcttctcttcctcctgtctacattgtttctactgcccgtactcccgtgggctctttcctggggtgagcatgcttgcattcgtcttttcccccttgaagacttgatctgacatcggttactgtagctccctgtctagcttgactgctcctcagcttggtgcacatgccattaagggtagggcatataccccaagctatactatacctattttcaatgctaatagtaacttgcagccgctgttgaacgggccgagggtatcaatgcctctgacgttgaggaagtcttcttcggtaacgtcttgtctgctgggtaagttatctttgctacatcttatactgcaattgagattgacgtattccttatagtgttggacaaaatcccgccagacagtgcgccctcggtgctggccttaccgattctaccatctgcactactgtcaacaaggtctgtgcttctggcctgaaggccatcattcttggtgcccagactatcatgaccggaaacgcggatattgttgtcgctggtggtaccgagtccatgtctaacacccctcactatctgcaaacatctcgcagcggtaccaagtttggtagccaggccctagttgacggcatccagaatgatggtttgactgatgcctacggcaagcacgatctcatgggtgttgcggccgaggagtgtgccgcggagcacggcttcaaccgtactcagcaggatgactatgctatccgcagctatgagaaggcccaggctgcccagaagtccggtgcatttgacaacgagattgcccctattgagatccccggcttccgtggcaagcctggcgtgactgtttcccgggacgaggaacccaagaacgtgagttcctcttgttctctgcgttagatttattgtgacgttcattgaccgttctttgcgacttatagctcaaccctgagaagctccgcgctataaagcccgccttcattccgggaactggaaccgtgaccgcccccaactcttcgcccctgaacgatggttctgcagccgttgtcttggtttccgaggctaaggtgaaggagctgggcctcaagcctattgccaagattctaggttggggagatgctgagcagcagcccagcaagttcactactgctcctgctttggctatccccaaggctctcaagcacgccggtgtgagccaggagtctatcgatgcctttgagatcaacgaggccttcagtgttgtggctcttgccaatatgaagctccttggtctctctgaggataaggtcaacatccacggtggtgcagtcgccattggacaccctcttggtgccagtggtgcccgtattgtgtctaccttgctcggtgtcttgagcgccaaggagggcaagcttggctgcgtcggcatctgcaacggtggcggcggtgccagcgccctggttattgagtctctttaaatagtaaattctgttaaggaaaaaaacagagatgtgaaacgaccttcgatctttgcatatgagataccaatttcatttttgacggggaagatactcggtggttttctgcagacataccatacccatcctgcagcgacgaacattcgcagtatcagtaccatttcttagtatctagaatagttaatgaaatatcttgtatgtttgtgtccttccagttgttgcttcgggggttggtctgagatgaagtcagagattccagcatttcaacaccaatgtactcagtttaatattgttggtcactagactattggatggcatcaatgtgttttaataaatgatacagggtatgtctgtaaagcagtcactctgccccagtgagaatattaacttcattagcctgattttgtgtacatctccgctaaatttaggacagccatgctgcctcaaacccgaaaaagacaagagaacattaagaaaaatcgtttttgggagagaaatatgaaagagtgatatcggggatgctgtaagacatatgcctctgtagactgcatttatatcggtggatataccagccctgagtgttgcagtgcgttgtcccgctcgagtcatcaagtcggcatgtagataatgcaagtgttccatgtgtttcatgagaatccccagaattaatatatatcagtatataattcctcaagtgaacatagtactattaatttggtatacatttagaaaaagtatcgcatgcgtcgttaatctatcagacattataattgagaaaccccacaaaacaagaactcatgctttcaagcaaaggctccgacgaatgccatgaggagagcaccgcaggcaacagaaacacatgcctcaacgcgtcgtctgcccttgagggtctcataactcgactcactcaagaagtcctcggcgaggagttccaccaggcccgcgaagagcaaaagaccgctgctaatggcattggtgatgccaaccattagcaaacctgttgcgctgccaggatcgtagaggttgtgtagaaccaaaccgatagcctggccaagaggagttgtcgttccgtatgctagtgacataagccatggtttcattgaattcggcgcgaacagatccggtatgagcgacgcaatccgagatcctagggcaaacccttcaaaggtctgatgaaaactgattgcaattaacagaacgacaaaggaggtgccagtcgcaacactgagcgccatgccgatgaagatgctgtgaaacaaaatgccagcttccaagaggaggcactgtagaagctgacgttgcggattctggattggcacatctgtgtcggtctgctgacagtggctttcgcttacacgggatcgatgccggtggacaggctgtgactgcgcagaatgagcttgtccactgataagtccgtcgtcatccatgtagtcatccagtccatcaaggtcatcttcatcgtcctctttatccggtgatgagtccgccaggtgaaggcggtccgattcatgggacgagcttgaagctctcgtcgtccgcaacttggagttgtgtcccatgctatctagattgagattatctgaaacctgccgggcctctaggcccgagtaatcaatatctgcgttccccccgtcacgtattgagccacgcctaacctcgccaatgagattatcatattcgcttccatgcacgtgcttggcgcctttcattgcaaagaacatttccacgataacaacggcaaagaccgatatcattgcaacaaaacctggcatagcacgatatgtttgactccaaaatcgagggagacatggatcggtcagagagacaaatgctgtggggagcagatgtacgaatgccgtcgcaatcaacacacccgttccaaaatgtctcgatatgaagaggaaccgacggggaatcggaagacgagggaaacggcgcgccagaaccggaaaggagcaagctattgtaatcccagtattagcaatggccagtcagagagccgagagaagccagtgcataccgaatgtactcagccctaggatgaggaacagtgccataacatgcaacggggtattatatttcccccgctgtttagatccgcatgccggtgtgtcctctgaagctccacctcgccgaagaagttctgctcgcaagagagcatcggggatttctgagattgcggagagggcacgcttcaagtctactcggaacatagttagaaactgtccacgatcaatttgcaaagacagctaacctgagggtagatccttcgcagtctgccagtcttgggcattctgcattttgttatagtctcgaatttgttgagctgtaaccacatccccagttggagaggggaattgttcgtaggccgggtaactgtccaagagatataggtatagtgacgcaattgggttaagataaagatgagactacacgagatggtcgatcaggaagacaacaaaaccagcagagatattattttaaaacaaaaaggccagacggtggtttttcagacgcgatccagtgagtcttgaactccggggctgcccctttcgcttagtcatacatactacgcacgtgggcaagacgagtcctgtgatttattgcagtgaagttgccgagaagtgatctgattagataaaataacatcttaggcggctccatgtcctctatctgctaccttagtccatcccttggtacctttgggtcgtgaggaagaggcatcttggccttgagtcctagaacgtgtttttgaagttctctctgtttccaccgatccgaattgagagcccatggccttggggctttgcggaacagatggctgaggggaatccatgaccgcatcgtcccattctttttcttctagcaattcccattccgcactggccatttcccctagaagattggacttcaatttatctacgatcctggttggggttgggagtttccatattcgcatgaattcaactccttctgatgctcccaggaaagaatgtgccgtgccatgagaatagtgacccaacatgggaaaggaagttgtccgctgaatcgtggttctgggagagtcttttgcagatttcatttgtgtctgtgtgtctcggccggcaaatactcgcatcagagttgaagggtgggctggcggagctaccagcagttgccacaagctctttccgatgtcgcaaacttcctcccaggagtccgatgagaggtttatcccttgagttcgacataaccatgcaacattccatgccaagagggtggctccttcaagaaagaaggcgtatgttgcgggatcttccttcgctaaccggggcagaggcttatcgatgaagagaggccgcgggcgtgatgtgtgggtgcgcgggtccaccgtcctcgatgcagccgggctcgacgaagattggtaatcagctccatcgtgaccgttgcgcgagcgatatgatgccgagggggtgtagatcgtaggtacaggatagtttttgtgaggcagtgtaatttcggcgggaagtctcaaggaaagatagtgtgagacaatgatcagaagatgagcgatgttagaaaaagacgtggatatctgttcctgtggaatacctgtactcgctctgttagtacgccacgagatgaataactgcttgaaagcgacctcgggactatggaaacttgccattcatatctctcaagtcaacgatcaaaccacatccaagcacataggtctcccgaccttggcccttcttcgtcgccttccgcaggccatagagattggcgacttctcgacaaagataaatacgtgactccgccgtcttgctatggagggaatgccaaacgtgctccacccgtttgctggtattttgaacgcccgccaaaattccagtctcccgctcttctagttgaaagttggcagattcagcatccgaccgtctgcgtgctagggcttctttttgcttggcaatctcggcttttttggcttcgacctctaatttcaaagcctcaagctgatgcgaaaccaattgtctctttgccaaagacactgcatgtctagtgcttatcatttggaggacccagcggggagagcaagctttgtccgtatcgagcaggtcttgtccgtgcggggaaggctcatcccacgagctaccgcaggtaacagcggtctcgatctgctttccaaggacttctttctctagaagaacttgagtgctgtcgattcgtagttgatatagctgattgcgggcacatgtcggacagtggaaagaaaggcgagattgaggggcacgcgagcatatggaacagctcatcgtagacaatttgattttattttcagctgttctttgaaggcgtaaggggcatttccatgttgcgttccaggataattatgggtgctacttgagtcgccgccgagaaccatatagaggagtgagaaggggtcgtcaaagagataataatcccacatgactcaaataatacgttgatatagaggatatgaccggcctcaagacatcacctttagccaatcttttagaggaaggaagtgaagaaaagacgggatgatgttcacatgcacctgtcgtcacctgacgctccgttatcgcaatcttatctctcattttggataagggcatctggaacattcacgaatcgaaacaaaagtgacttctaaatctactgaaacaatcatcggtcttggtatggcttgattttgacacctcatcatatcgagtcagcaaatccagtatgcaggcaacaccaaacaggaccagcaaaattcctcgacgggggacaatgtcaccccgtgtcagccaaggaagcaaaagccctacgggcagtgggagcccccaagagaacggaagccctcaattaccggtcgaagatctagcatctacatctatccatgatgaagccccatttgcttctaggttgacacaagggctggaggactgcaattgggaacaactccaggggaaatatgccgatgcaatggacgaacacggccgagtagaagagaacattcgtgttgaaacagccaagcttcttgaagtaagtctcaaagcatgttctacttgcaattttgtatctgagcaatcggtaggctttcatggcatggtctcaaactactgtttcgcaagatgagaacagggctttgaaaaggttcgatcaatccagctttggtttaagatatcgattaattctctacaggttcaaaacccaaatgcagcacgttcaaaattccgaagtcaatgtggaaaacaaaaagaagcattgtaagtatcttgtcctcgtgacttgaaaacaagatctgtttgctgatctgtctaaagatgaggaagtagtaaaggctttccaaaatgcacttgccttgctaaacgatcaaatgaagatttgagcaaatgattgacacgatatttatgattatgagtttatgttaccccatcccttctcatctgaaaatcgatcttcaagacagaaattgcaccagtatgcaagaagctatccagtgtgtctcacctacgatggcctaaaaagaaaaagatcaaatcattgaaaaatgaatgtactacaaaaagagacagttgatattatgggagtcatccaaatgggactgctaggaatatcaccaatcattattgcaggcgaaagagttacaggttggtagtctgggagaatacgaggctctggactctagtcactatcattttaaggcctcggtgattattcccgggggcggtcactccgggtagctctccctgtgatatcttgccagctggcgttgaagcgtctgccggtgttggccaataaaccttcctcctcagcttcctctgcatcgtcgtcgagttgcgcttcatccaaccgaggtgaacggagaagggaagtaacaaagacaattagatataagcctgtgatgttggtgttagataaacgcgaacatggaactctggtaggaatgcaacaagacaagattgagacttaccgaggaagaagaactgagcccaaaagaacaccactccaaagaatgggtagttcagcgtgacccggttcaagaaggtgctcacgacacttggtgtgcagacttgctgcgcagcaggattcttcgccaactctgagcatggcttgataagttctttggtgtttgaacaatctggcattccaatgaaagctcccggagcgcgatcgcagaatgtctgtggcccaaatgtcgcatactggggcgcgactatcattgaaatcgaataattcagcgctaaaatgatcagcatcaacatggcggtggccaaaagtagagcctggggagatgtgtggccgtttctgatttggaaaatcctgacccataggaagcggattccgaccacggcgattccaaccacagaactgcagaaaaatagcaatacaagtgcagtaaatatggcatagtcaatgggaaagaacctggcagatttaacaagtgcccagttgacgggattaaagatgttgacatgtgcgaggatgtatccacaacgatgcttgcaaatcgaattctttgctttgtcaattgcggtcaagagcatggatacccacgttaagaaagcaatgaatagcagcaagacgccccccaggagcttgaagggacggaatactgctccaagtttgtaccatgcccttatcaaccagctgcggcctccgccttgggattcttcggctaggcgttggcgccgaatcagggtcctttcttcccgcactagtgtatcaagttctcgacgatctttggaggacagaaggtcgggatctccggcacatcgtccctcaagctgccgttgccgctcctggtttacgtcaagttgttgtgtggtgctcgctcgcagggtagcactagagattgatggtgcagtcttgatcaaactgattggcagaagggccagtcccacggatgtgtataagacataaagacagagcccaattgtcatcaacagaccgagagcaaaagtgagagcgcgctccccatcttttcagagttatgtcagcttcacatttgtgttacacgacagaatactcgaatactcacgattttcagtcagtaagcgcctgaagtaatccaggtccatatcattctttcctcgtgacactgggacgaagaagccaactaagaacaagatcacgacgactgcaaagaatgagagagtgtatttgagggcaccccaaatccgttggcccaaagtttggtccccctcctcggtcgcaacctcatcatattcctcataccagaaatatgtgaaggggatgaccagaagacagagcaaggcatccaaagagtagagaagatagtagatgatggtcaaggaataagtgattctgtccaccacatcctgtgttgcccagtcctttcgctggcctaactcggacgatgtagtcgatgataccaaagcgacatcgacaggcagcagaagcactgttgcgagaagactagtaattgagatgatgcaagccagagtgactgaaggagagcggtcacggggagtttggtagacgtagataaacactgacgccactgccagtagaatagctaccaccaccccatacacagcccagatgagggaagtctgaaggagtgccatattgaaggatagcagttcacactatgcagattgaggtctgcatcaacactcctagcaaaatactaaaggaatgatgcgaggaatgaaacttcacaaatacaccaaatatcaaaacaagaaaaatgatcttcccttccggaagctatcgcctgtgtcgtcattgatcgtctgacgctaacccattttgaggcatctacagccaagggcggtatgatttatccagcagaatagattgaccgcttaattctgccaggccagtcagctgacccgcttctgtctccgctttgcttccgcttcgaaggagctacaaacttcactgcacaagacagagatcaatctggatcttgatcttgatcgcttctcgtgttaatattgaaacttttatctgtgtcatctctttttttttgcaaagctttccattcccagttttccccctaggtttgcaattgcaatgtgcatctcaggccatatcaaaaacacaatttagctcattagcggttctctagcagtatcaagcctttcacgagctttgtcggtggacgaaaacttcaaatgcagtgctacacggagcttttaccccctacgggggtcacccatgctttggcagttcctttcatctcagcaaccaccagcaatttgattgttgtcagaacctctctattgcaggttttctctctcgttaaggtcacctcctctcaaccacagacggaagattcagagcctcattcttcacaattttctcagccagaaacaaaattagtactggaaaaagaatacccgctatccggaactgtgactgatttaagccgagtcaaaatcttgaataccaagagtggcggaggagccatattgattgcagtccgcaatgccaagcttagcttgattgagtgggaccctgagcgtcatggaatctcaacaatttccatccattactatgagcgggatgatctgacccgcagcccctgggtgcctgacctgagccggtgtgggagcattctgagcgttgacccaagcagtagatgcgcggtgttcaactttggaattcgcaatcttgctattttgccctttcatcaggcgggcgatgacttggtaatggatgactacgattcagagcttgacggagaacgcccaacaaatcagaactctggcggaggagcgcagatcgagaatggcaaagaagaatcagcacaccaaacaccctactcctcctccttcgtcctgccattgactgccttggatccttcattgctgcaccctataagtctcgcgttcctatacgaatacagggagccgacgtttggtattctatattctcaagtcgcaacctccactgctcttcttcatgaaagaaaggacgtggtattctatgctgtgtttacactggaccttgagcagcgagcttcgaccacccttctttcggtatctcgtcttcctagtgatctattcaaggtcgtggcactcccacttccagtaggaggtgccttgctccttggctcaaatgagattgttcatgtggaccaagccggtaaaaccaatgcggtgggagtcaacgaattttcaaggcaggtttctacattttcaatgaccgaccaatcggacttggcgttccgcctcgaacgctgcgtggttgagcgacttggtggtggtagcggtgacctgctcctggctcttgcatccggcgacatggcactaatcaaattcaaacttgatggtcgatctgtctccggtatcactgttcacccccttccagcgcatgcaggtggagatattttgaagtcggccgcctcatgctccacttgtctcggggatcgaaacgtcttcatcggcagcgaagatgccgactcggtgctcctagaatggtcgcattcatccgcctccactaaaaaatctcggcttgaatcaaaacaagcagccgatggtcatgatgatctgtcggaagatgatgaccagatggaggatgatgacctttattcctctgcgcctgggtcgacacaagtcgataatcgcatgggaaccgacaactcaacccccgaattttataactttcgactgaacgatcaactgtctagcattgggccactgagggacctcactttgggcaaagctttctcgaatacgaatggcaaaagccaatctccaagtgaaaccgttgccgcagaactggatttggtggcatctcagggttcagatagaggcggcggcttggtagtcatcaaacgtgaaattgatcctttgactatcatgtctctgaaagccgatgatgcggatggtgtttggtcagctagtgtcacaaaaaagagaggagctcccagcacagacaatccctcctgtcaatatgtgattatctctcggcctacggatttggagcaggaggtgaacgagctcttcgtcgtggaagaacaaaccttgaagcctttcaaagcacccgagttcaacccaaatgaagattgcacggttgatattgggtctttggcagggggtactcgtctggttcaggtcctgcagaatgaagtcagaagctacgacataggtacatttcaatttagcgtgctagcaaacattgcataagctaattgtgaaactctacagatctcggattgtcacagatttaccccgtttgggatgaagacaccagtgatgagcgtgcggctgtgagcgcaagctttgtggatccttatcttgtgattattcgggatgattcatcggtattgcttctgcaggcggataagagtggtgacctcgatgaagttccgctttcagatgagattagcttgtcacaatggcgctccggctgcctttatcacgataattcacagtcattcagcgttgcaggctcatcgtcgaaggactttccagaaggcgaaatgattctattcctattgaatctggagtataagctatcggtaggtcgtcgcgaccaggaatttcaggcgttggttctgacttgcaatacagattttccgactttctagcatgaagttgatcgcgataattgaaggcgtcgactgcctaccacccgtattatcgaccgagccgcccaaacgatctaatactcgggaaatactgacagaatttgtggttgccaatcttggtgatagttctagtatttcaccttatctgattgtaagaaccttttgtcagtccatcgctttctctgctctctgactcatgcatttaggttcgaaccgaaaatgacgatctcgtgttctacaaaccaagcctaatcccggcaaaggctggccatgagtcgtctcgtcgcttgcaattattccgagagtcaaatcatgttctgccaaaaagttcaggggaggtatcctcccaaatacagaagcaacagcgattgagaccgctgagggttcttcctaataactcagggtttagcaccatctttatgccgggagcttcatcaagctttgtctttaggacagcaaagagctcaccgcacatcattcgtcttcgaggaggctttacacgttggctaagttcctttgattcggccaacactggctgtgaaaatgggttcatttacgttgattctcaggtaaggttcttcattcggagttgtgatgccatgtatattcactaattctctctttgtagagctgtatccgggtttgtcaactaccttcccaaactcaatttgactatccgtggacattgcggaagattccaattgaagagcaagtcgatttcttggcctactcgacgtcttctgagacgtatgttctcggcacaagccatcaaggagacttcaagttgccggagggtgatgacttgcaccctgagtggcggaatgaaggttcgtgtttgcttcaagcgtttcccatcatgctgtgctaatttaatcctaagagttatcattctgtccgaaaattcccgaaagtagcatcaaggtcgtcagtcctaagacatggaccattattgacaggtaaaaacgcccacaaagctcgagtcatgacgagtccgaatactaatatttatagttaccctctggatcccgatgagcaggtgaccgcggtgaaaaacgtgaacattgaggtctcggagaatacgcacgagcggagggatctaatcgtcgtcggaacggcgattgctaaaggggaagatatgccagctcgcgggacgatctatgtctttgatgtgatccaagtggctccggaccccgaaaagccagagacaggccgcaaactcaagctaattggcaaggagtcagtgaagggtgcagtgaccgctctgtctggcatcggtggtcaagggttcataatcgtcgcccagggacagaagtgcatggtacgaggtctcaaggaagacgggagccttcttcccgttgcatttatggacatgcaatgctacgtcgatgtcgcaaaagagctcaagggtaccggcatggttatcctgggagatgccgtgaaaggactctggttcgccggctactcagaggagccatatagaatgacactcttcggcaaggaccccgaatacctggaggtggtggcagcggacttcctcccggatgggaacaagctgtacatgctagtcgccgacagcgactgcaacctgcacgtcctgcaatacgaccccgaagaccccaagtcctccaatggcgaccgactcctcagccgaagcaaattctacaccggtaacttcgcatcatcggtaacgcttctacctcgcacagcagtttcatcggaactcgccgagtcatccgaagaagcaatggacgtggatgagaccttcgccagacatcaggttctcatcacttcgcaaaacgggtctttggcgcttgtgacatcagtggctgaggagacataccgtcgactgtcggcactacagtctcagctgatcaacaccgtcgaccaccctgccggtctgaacccacgtgctttccgggcgattgaaagtgatggcgctgcgggccggggtatggttgatggcaatctattgcgtctatggctgaatatgggcaagcagcggcaggctgagattgcgggtcgggtcggcgcggcggagtgggagatcagggctgatctggagaccattggcggtgatggactcggctatttatgatgccggcaacagacgcctttcggtgcattagtttagagggaaattccaaaaacggactcactgggtgagcttactcttgcagtttgatcctatcatgtctacgtctccgtaagataaaagagaagggtcagcccaagataggatttcaatatattgatggcacgagaacatgtatagctgaagttctctcggccacaagatcaagtaaatagcgtaatatcataacacaatgggatataactaaaccacacaaaaggagacacagatagaaaaaaaagagaccccagtgccaatcccaatccagtccaacgtgggtaatccaagtaaatccaagtaaatccaaaaacccagccaatccctaaatccacaaaacaaaagagataaatcaagacaaaacaccgcattcgccattctcgccttgcacgattcgaattcaaagataagaatcaaatgcttgaaatcattcgtgcctcccatgagcatcaatatcagtaacacattcagcatgtcagcttggagtcaaccatattttgtgcttcgtgttctatgggcaaacacaaagccaagtctaaaaaacgtcaagaaacaccaaccccagggtgataatgcagatgcgagaaggaaaaggacaaacgccactcagcgccattaccccagcatcccagtgctggggagtttagaacacatcttctgcggtaaagtaccgcttattccggcctctggccacaaatttcatctccggcatgttggtgtgatgcactacatgtggtcgatagacagcgtcgacaggggcttgccattcatccatgccgagggggaagtactcatagagaagatcatcgttttcgttcgggaaggggagcgacgatgcgaatgactggggcaggttggcagtctctagcaagggcatagatgaagcaacgctccgcgagggggtctgggagacagcatgcgagagcttgcgcatcttagaaggcgggaccgactggtcaagactcagggatcgctgatgtgacaactcggcagcgaaaggggacaccatcttttgctcaagatgaaggttatggtcaccgctctcttcctcgtctagcaatgacagattgatcggtgcagcggccgctgtcgtggaattgactcgacgatgtgagtccgtcgcctgggagagttgctccgggctggattgacggaacatggacttcggggcatgagacatgacattgttcgacgtggactgtgggataggggtccaatccggcgtcgctttgctctgctgcataatgctcggcgggggaacagacgttgtttcaggagagctgctctgcgcggctgtcttcgtcttggctggagtcacgctggcacgccgcgggacggagtcgctggttggcgtgcggttcacggcggaattcgaggagttggcctgattcttccgggaagcggcagcactcccactgagggggagatctttgcgtgactggaagttgcgtgggctgcggccacgaacgatgacggggcctgactgtacctcggagatggagatcttcgcacccgtggataaagtcgcgaccaccttgagtcggacgacgaagtgttgctgtagctcctttcggcgaccattgttggcggtcgcaacacggaattgtagacgtttccaagcgatagggaaggtagcatagtccgagtccagatcctgaccggccatgatgtccaagggaattgggggaggctccttctcgatcttagcgccagtgctagggttgttctcctcgggcgccgtgccagaattagcggccgccgctgagggggtcttccatggcaccgagataatcttcaccgggtttccctccacagattcggtggctgatacggtgagttcctgggcgaggatgggaattcgatcgccttggtcggtcatgatatagcgcatcccgcgaggcaaagttaccgagccggtaatttggaacaaattgcgacgataacacgtcaactcggcaccttgttgcggcggggcattttccgaaggggatgttgtatagggggactcggcgagaaaaaacatcccatgtaactgggcggacaccgataaggatgttcggcgcatggaatagtcgaggagcgtaaagtgatacaccggtagcgaaaagcttagcagcttgttgttgtggtcgatcgatgagtcctggggttgttcctggggcgctgggtcaaagggcgccaccatctcggtgaaagggtcatcgtatgcggaagagaaacgcctcagttgatgtgccagagtaggaggcgcgaaggtagcgagatcctcactaatgtataccaaattagcccaaccatttcccagtcgggcggagtggatgatccacccctctcgtcccacttggagatcttatcacccacctaacaaaggtctcggaatcgaagttggaacggtgatcgggtagatccaggccggacatcgcattgagatagtcggtactctgcaaattccccagggacaatggactggccatgtatggtggcatcgccatagtgtcgaagccctccatggtaagaggtgcgatacggagacacacacccgtagacgatgcggggaaggaagaagtataggattgcctcttctatataaaggcagtcgaacgagagacagaggagaagaaggaagtagactaaagggaggaaatagacaagagaaagaggtgagacgaagataagccaaggacgagtaggcaagacctggggaatgctgcaagcaacggagcggaaagataggctaaggcgggagtgaaggcggagaggacatttgagacggaaatggaaaggtcagtggagagcgaggagagcgaggagagggaggagggcgaggtattagacggaggctatagaggaaagaaagaagagcaagtgaccagagccgggagaaagagagaggaatctcgacctgcacccaaacgatcaacggattcggggaatagtggagccgcggtttttgcggagaacgaacgcagcgctgagtcagtcaccttattatttgattttatagaaaaggttttattaatgtttaaatgtttaatgttttattcggaattcccttttgattaatcggtttaatcggttttggatacagagtacggagtaggacggagtatcgcaaacgctcatgaccaatggcaattaatatccaaatccctcagcaccgatggggtaagacttgatcgccggctctcggcaatcattccccccaggccctgaagatcaaggtgttctttttatatatgatcactcccaatatagcattcattgtccacggagtactccgtacagagtacatcttcggatactacaaggacaggtaactaactataacctgagattaaatccactttaatgcatacccacctgcctattaaggtactcctgcttcgggtcccccctcctgaaaacgccacatattaataatattatcattttcagtaactcactatccttggattaggataaggatgagtaatgatgcaccttgtctgtataggtttgactagattaatagttgtctatactcgcagtattccaatcaagccatgtacctccaattgtatcacttaatacgatcataatcgcctcaaggatgatcatcatcggccgtctgacatgcatctgtaggggccaacagccatccaatcagaatatgcggcgcattggatcagaaagcggtgccccccgtacggagtactctgctggaccctgtactttggctatgagcgccccactgaaaacggcaatgataatctgcaatctgcaatctgcaatctataatcggcaatgttatcatgcatgtaatacttagataagtacactccgtacttactccgtacggagtaatacttgtagatagtgcccaatctactccgtaccgtaagtacctgcacttttttgttttcttctctcgccatcgagatttaaataaaataaaatccattgtggaaggagatacaacatacagcctggtccaggggatgtcagacggtaagagagtggcgagagaaaaagagaagcttccgcgggtttcgcatgtgagccaatggagaagtctgtgcatttacccgattcgattattaccgaggcaattccttctaattcttcttccggcacgtttcccgatgcagcctacaaagtataccaaggttctgaccacgggagccatccacggacatgacgtcctcgttccaaggttctagccttcgaaggttcgaaggttccaaggttggaagctccagccctgggctttcaacggtgccgattaacctttgggtttgggcctgagatcccgaaaagcttcatacaatatgtactgtactccgtacctgaaagatctctctgcaatattccggggggtcggagaccagaaatgtagaccttcacaacataacagacttccagttcagtttcagccaaaaaaaaaaaagagagagagaagctccgcttgtacaaccgagggatttttgacgcaaacagaaaactaaattggtttgaaactctgagccaatgaaactcatttgcccgggtcaaagtttggacccaaggcctgaggaacccgtttgggggttcgattgttgggttgtatacggaggaggagtacggagtatagaaaattagaaaatatagaaaacacattgaagagagagaaatagtctctttatatacccattcccttctaacgtcacattggaaatgacaaagaccaagacacaatactccccaacacagaccttgttctttttttcttttacctaaagtgcgccaaagcggagttccgttcgaagccctaaaacccagaagatgtgcctgtgcgaaggacgtccaacggagctccggaccaatcagagctcggggcttaattgtgatgccttgggaaagctaaagggaattagaattaatctcaatttccccacaggttgaatgaaggaactgatagccgagtatatttgtatacatataaaatacatacagaatatcccaattgcagttctatctgtgtatgtggtcagagatgtatttgtttggaccagatgacgccaggactgactttctgtcctaccccggacctaactgcccaagaatcaaagatgtgtgaaaagaaactcctcggaagaaaccgttactggatcgggtgaaacaaagatggaggaaatggagaagaaacagaaaactggatagaatagatcccaaacccaatgcgatatggatatcataaacgcgaacagaaacgcaaagagaaagaaaagcagaatcgaaccaagttgatcaagagtcttctacgcgtgcatcatcgtccacgaagcggcgtcacagttcacttcctcaaaactatgtagcatagtgaagcccatcatcgagagattgtcgaagttgccgtcaccatcgacctattccagtgttagaagataaccggggaaaaggaacaagcccaaaaaaacatacacagtccataaccacggcatcggcactcagcttccggatctgcttgatagctagcaggaccaggccctgcattaccgtagagtaatgttcgccacaaggagaaatcaccggagacgaaatgcctccgacggaagcctgggtggcgcgcaacacgggcatgtgctccgccaaagcggatcgctcattgtaaatcacgatactcccgagtataaccccgtcggagggccgcttggcccggatgatcccgcaattaggcgccccgcccagagccatgcggtagatgtcggccacgccctgccgcgcatacgttttgatgtggtcgagaatcgcgggcgcaaagtcccagccatatacgagatcgtacgtgacctcggcattctgcagagtcgccgtgagcccctcgggcggcacccatgtcgacaggttgcgcatgatcacgctgcacactggtcgcgaaagcgccgtgttccaccccatgttcgcgaaccattgccgcagccgcttgcgctccacagggttgacggtcgggatgccaaggtagatccctggtaatcgggatcctagctggaagcgtttcatgccggtccgctggagcagagtccgaatcgcgcggctgtgaagggaatgtccgattgagagtttccttcgagatgggtctacgatcagacatgcaatcacaccggtgcccgtggatcgaaagaagtaggtcgcgcagaacccgtagagggcatgcgtgctactgttccggacaacaaaatgggcttcgtcgatatcctccttccggagcaagaagctgctagcggtagctccaagaagttctgacggctggcctagtgtacagtcgacacggatagtgtcgagcagggcatccagcgcgaaagagtcgcgatcctcgttccaattctcgacaagccagtgctgtcgagactgatgaatcttctgcgttcgcccaatggagccaggcagggccgctgaaggtgtcaagtcgccatacaagaccttgaccaatgcctggagggcagtttccgtgaagtcatacgtgcatatgtaagtaccaattgaggaatccatggcaaaatcatatggcgagctaactgccaccacaatcaatggtttcgcgcgacgttcgccagatggggtatactgcgattggcagatcatggcgacgtgttttgagaacccttgctggtagagattgcgattggcatcggccgtgacaactactacagcactcgctctttgaatgaggtcgtcgtggatgggacgcacgccattggaagtataggaggtgtgcaacacgcgcccgttcctctgccgcgagagtgatcgtccaagttctttgaagaccccctctccactcagaatcgaggaggttcgttccgagcataatggatccagtgacccacgcgcagactctgcgaccgagagagaaaccgctgatgttgggaggggcttgaccagcggcgtcagaagcaaaagttcttcgtctggctcgatgacattggacaatggaagtaaattattcttatctctcatcactgtgatggaagagttgtaggctcgggtggaaaggttggtatgcgagggttgcatctgcgtaagtgaagaaagccccggagggttcagtgcctgttcccacgaagtacaccgcgccttcaaatccaaaacgcggcgcaacgattgttcaatccgctgacggctgatgataccgttctccacgccgagtttcaacccgttgatagcttcctgttggacggggaatgaccgacataaaagcatgacgtcgcagccggcgttcttcgccatcactgtgccacctcctactccaatgttatgtgtgagcgcctccatctccaagcattcggaaacgaccaccccttgaaactggagatcctttctcaatagctcgttaaccacctgatcactcaggcacgcgtgcatcacgttcatcccagccgatgacaatgagacacctcccactatcatggcatccaggccctggttgatagcgttgcgaaagggcacaagcgcgttgagactgagttgctctagggattccgtaataattggaacatccgtcggggagccgagaaattccaaattaccataggacggaaagtgttttccacaagttactaaacctgcttcttgataccctttcatgaactggacaccatattgagacgcctcttggggatcgtcgccagcggtacgaacgcctaatggttgatttcgcacattggtcaaaacatccaaaacggggcccaatatccaattgaccccaacggccttgagctcctgtgctgtcgcgacagccacctcgtgcgctaatgacttggacccagtagctgcaatgcccatggtactagggaattggcggatatagatctcatcatacaaactgttgacgccaccattctcctgatccaaggcaattagtaacggaacaggatggcctgcatcacgcgcaatggtctgtaattccagaaccaatctagttgcatcctcggccgctgtaaacgtgtcagtgactgtctaagtagctagtgacaaagggcctttttaaagatacatttcaggtttttagcagatagcatcacggtacccaagtggtaattctcaatgagtgatcgaatctgtggattgacctcagtcccatcaaagcccatcataaagagctgacccatctgtctgtgccatgtcagcgtactccggtgtcaaatttcctaaagtggaaatagtctacatgacgctctccagattgacagttaggttccacattgaagggagataccccaacaggcagattttagggggggggaggaatggggcgagggttaacgccaataggggacgagccaagcgaaaacagtagatcgacatacctatctaggtcctcccagcccgggggcagcatgccctctttccgggccatggcccgaggaggaatgcctgtagcggcccagagaggtaggatacagagggtgcagtgtcgggggatccaaggtgtggacaccgtaaacgtctgacgggtacggaatatgaagccagtgcacgcgtagtcaggtgacaagggagggttaaagggttgcaggagtcaaaattggacctcgggagctttgtctttctcccccggagccgcaaatgttggggaagagtcgggaccagagagataaggcgagagataaggagataggagcttagtattccccgctgaagggtcacgggatcttggcatttctattatgtacatagttatgtaagatttatattcagagcttggatattcagagcctatgacctgggaggtgtgaatataaagaacacgatttatagacatacatctacatagttatatagcgtagatgattgacacatgagaacatttcgatccactctgtatacacccgaagaaccgtcacgtgctttgtatgtaaccgtctccggatccattccccatcacgtgccatacataccaataccaataccaataccactgtcatacctgcaacggctacgacgctacaacgtccaaggttgcactgaacacgatattctccagcttcgtaccgacaccaccggatgcaactcctacacttcgcaatggaaccttcaaaccaccatgtgggctatggagctccatactccaatcacaacgcccacgtccttttttttccggcgtcatgtcactttgggcttgattgttgagccacatggaatacacccgagtggacattgataatcaacccgtggaatcggccgaatgaagtcaacggctatctgtccagggtgcggtagcccgcagacgtcaaccctctagttagataggggcaaccgtcttgcacgtggctttctatgcgacgttctttgctgtcactgtcgtacactccacccagactgtaacccataggattcctttaaccttatcgaatggtctcttttccttcctcttgatgccaactttctcctcttcctttcttcttctcccatactcctcagccctactccaatccaaagacccgtgacgtaattatgtgtgtgacttcttctgtgtgtcgccttctggttctatactaacctgcttctcgataggcgtgtcattatcagagaagatcctcgtgatgtgtctgtatacattgcagactacattatcagtaagccgcagccgagatcctcgatgcgcgaatgctgagactaactcttccaaggccgcatcaagttgtttagcccgacgcccgagcagccattcgtgcttggtctgcctactggcagcagccccgagctcatctacaagatcctcgtccagcgtcatcgcgccggcgagatctccttcaagaatgtcgtgactttcaacatggtaggcgcaaaaccaatcacggggaaaaacagcccactaacctcaaatacaggatgaatatgtcgggctgcctcgcgatcaccccgagtcctaccatagcttcatgtacaagcacttcttttcccacgtggacatcccaccgcagaacattaacatccttgacggcaacgcgaccgatcttgtagccgagtgtgcatcattcgaagcacggatcgcgcgctacggtggaatcgagctcttcctgggcggagtcggaccagacggccacatcgccttcaacgagccgggctcctcgctgaccagtcgcacgcgcgtcaagacactggcctacgacaccatcctggcaaactcccgcttcttcggcggtgacacggacaaggtaccccgcatggctatgactgtcggtattcaaaccatcatggattcccgcgaagtggtgattgtagccaccggagcgcacaaggctattgccgtgcagaagggcctcgaggaaggcgtgaatcacatgtggaccctctccgctctgcagctgcaccagcacccgctcgtcgtctgcgatcgcgacgccactctcgaactcaaggtcaagaccgtgcggtacttcgagtcgattgagcaggccggcaccgatgcccgcacccagggacccgctctcgtttaccgtcctcggacctacgtcccttcccctgtacaagttaagacgcccaagtcccagcagcctactcccgatggcactcccgaaaaggtgcccaaggacctccgcatcaacactgagctgcaccgccgcgcactggaggaagaggagctcaccccagatagcatgtcctcgcgcctggtcgactcggccattggcggtatcgacggtgcactgaaaggagaccttatgtttgaccgcatgggcaccagacttaccacactctgatgggaacacctctacacttttggcattttaattcggggtttttcttttttttaaaaaaaatctttttgtgagagaacaggaatatggattctgtctctacaaatcatatatgcatgggtctgttttactggtttggcttacaggaaccatgggtgttatttaaggagtttcgctggtcaattcgattattctcgacttgatagatgagatgcaatgcgttttctaggaatcagtgatatcaaacatttagctatgataatttaaagtgtgtacaattaatttaaattttcttgtttatgcgtatcattcaggatatatatactttaaaaagggcaccttgacggtgtagactttcagcgcggatatatggttatagatgctcgagtaatagattaaagatacagaaagaactagaatatgcttgtgtgtcgctcaaattgtatattctgtacattttattctccttgcttttgggtcgtactgcatgatatattaacattatagcttggcgaagacactgaccacagtaccgctcatatcaacaagagtgctcttgttctgcagccaagcctcaataccgcggcgaccattctccacgcccagaccgctcttcttccagccaccgacggccatctcagcagggctctcgccccacgtgttaacccaggtaataccagcctgcagctggtcaatgacgcggtgagcctggttcaaatccttagtgaagacaccagcagcgagaccgagttcagtggtgttggcgcgtcgcacggcttcctcgacggtgtcatagtacaggatggacataacgggaccgaagatctcctctttaacaattgtcatggagtcagtgcaatcggtgaagatggtcggctggacccagaaaccggcctgcagatccttgggcaccgagggcttctcgacaccgccacagagaagggtggcgcggtcagactcaataccgtggcgaatgtatgcaacgaccttgtcgtagtgggctttggagctgaggggaccgaagttggtctgctcgtcaaagagcgggccagcccgcacatattggatcttctcgagcaggctcttctcgaaagcagccttcatggtgcgcgggacgaagacccgggtgccgttggtgcagacctgacccgtgctgtagaagttggccatcatggcgccattgacggcgctttccagctcagcgtctgggcagacaatcaagggactcttgccgccgagctccattgtcacgtatttcatgttgcccgaagcagtgcctgcgaccttcataccggttgccacttggccggtgaaggagaccttggcgatgagtggatggccagtcagataggcgccgacatcgccggcaccgttgatcacattgaagacaccgtcgggaaggccggcctcggtatagatttctgcaagggtctgaccgtgaagcggggtgtattcactgggtttatagatcattgtgttaccggcggccaaacaagcagcagatttccagagggcactaaatatactagtcagcttttttttttctctgctgttgcaagcgcaggatcggggaaattacatttggatggggtagttccaggcaccaatgccggcacacacacccagaggggacttcttggtgtatacccaggcatcctcacgaagttgagtggtttcaccgttcagaccaccgccaccaatgaagttggcatagtactccaaaacatcggcgccagtcgtgacgtcgacggtactagtctcagtataagccttgccggagtccaaagtctcgacgcgcgcaatttcatcgttccgctcccgtagcagtgcagcggccttttggagaattcgggcgcgaccaatcagcggggtctgcgcccacgaggggaatgcgcgatgggcagcattaatagcggcatcaacgtccgcgttggaggcaatctggatgtcggccaacggagttgccgtggcgggattgatagtctggaatgacttgccggaggtcgctgcttggaccttaccgtcataatagagctgacgaggagggaaagagagcgacatgattgtgtatatgattttccagctatgtagaaagctacaatagaagataagagaggcggaaataacacacaccgccttagaattccacaaaagggaaaaagcggagctatgtaatcctttccggttttatgtactcggtactcggccgcatagcataactagtacgtaacagccaagtaccaagtacgccatccccgtcagcggctgacggtggctgaaacggcatcgtcctggcgcggggttgttatcttttggcctttgagcttcttcttgctctctccggttagaaagtccccgggaagttcatactaagaaaggcatttcttcgccagcgggaaagtcgacgtactctatctacggaatcgcgcatcggaagcgaattcctatcatggaccggcctcctcttttccccaatctgccgagattaactcgaatgcaggaagtatgccgataaagggctgatactcggctggtaagagtcggtggacctcattatccggctcatctcgacttctctccacttttagtgatcgccaccactcagagaccccaagattcgctgagtctgacggaaagaaaaaagaaaaaaaaaaaaaaaaaagcccgaaaaaaggtttggacgaagctgagcaatccttggagattggatcgaaaggttttatccgatcagaccaccctccgaacagtttggatatttctcttttagagaccgtcctttcttctccaatcttctccaaacattctcctcactatatcggtccttgcctattcccccggtattcaatatggccaccactaacgagctcctcgccgccgatgttaacagctacgactacatcgtcgttggcggcggtaccgccggctgtgtgattgcggctcgtctggccgagtacctcccgaacaagcgcactctggttattgagggaggtcctagtgatttcatggatgatcgcgttctgaacttgaaggaatggctcagtctgctcggaggcgagcttgactacgactacggtactactgagcaaccaatgggtaagaaacttatcttttctaaatttctaaaagagcttatgctgactatccccgaaggtaacagtaatatccgtcactcccgtgcaaaggtcctgggtggttgctctagccacaacactctcatctctttccgtcccttcgagtatgattgccgtcaatgggtgtccaaaggatgtaagggctgggactttgagacctttacccgcataattgataacctgcgcaacaccatccagccggtgcatgcccgccaccgtaaccagctgtgcaaggactggatccaggcctgctctagcgctatgaacatccccgtcattgagaacttcaacgatgacatccgcaagaccggtgagctgactgagggtgtcggcttcttcaacatctcctacaaccccgatgacggccgccgcagcagcgccagtgtcgcttatatccaccccattctccgtggggatgagaagcgtcctaacttgaccattctcaccaacgcttgggttaacaagatcaacattgagggtgataccgtgaccggcgttgatgttactctccagtctggtgtcaagcacactctacgtgcccagaaggagaccattctgtgtgccggggctgtcgacacccctcgtctgatgctgctctccggtcttggtccgcgtgagcagctgtccgcactcggcattcccgtcgtgaaggatattcccggtgttggtgagaacctgctagaccaccccgagagcatcatcatgtgggagctcaacagccccgtggatcacaacatgaccaccatggactctgatgccggtatcttcttgcgccgcgagctgcccgacgccgccggattcgacggcaagatcgccgacgtgatgatgcactgctaccagattccgttcaccctgaacaccactcgcctcggttacgacgagcccctgaacgccttctgcatgacccccaacattccccgtccccgctcccgtggtcgtatcttcttgacctccgccgatccctccgtgaagccctcgttggacttccgctacttcaccgaccccgagggctacgatgccgccaccatcgtggcaggcctcaaggccgctcgtgagattgccaagcagtcccccttcaaggagtggatcaagcgtgaggttgcccccggccccaaggtgcagactgatgaagagctgtccgagtacggccgtcgtgtcgcccacaccgtgtaccatcccgctggtactaccaagatgggtaacgttctcaccgaccccatggcggttgtagaccccacactgaaggtccgcggcctgaagggcatccgtatcgccgatgccggtgtcttccctgacatgcctagcatcaatcctatgttgacggtcctggccattggtgaacgtgccgccgagctgattgctggcgaggccggttggtctcgcaaccagcctcgtctgtaaagtagggcttatgacgcgtcaaggacctgatatgtatgtaaaagttgtttctttagtttggtcttaatttggtgttattatagcataggagcgagcggcgcagggcgcggaggatcgcctttgaaggcatctttccgagtcttattctccccagcgtctgcgagacagacctggtatacaattggttatggatgaacttgatatccaagaataaatttcttatcacaatttttgaaattgaaaatctaaatattggaactgaagatggatttcatgttcaatgcaaaaccacctcaaaacgcctataaccaagatgaaagctatttaacatgacagcaatataaaaaaaccaagaaacagatcgcatctaagatcgaacaccttataccttcacagcgcccttatcagtatcgtggatcttagcacccagcttccatacctgatcgactgtcaaggtcggcccagtgaaggcatcctcactctcacccaatatgatgagatcggcatcagcaccgctttctaacgtccccttaacaccctccaagccaagcagacgtgccggcgcagcagtgacagcattgatcgccgcagccgtcgacgcacccgaccaacgacggaagttgttaacacactcgataagcgtcgctgaagatccagcaatcttatccgagccctccagcgtcaaccgcgcaccgcttttaacaatccgttccccattagtccactcatagacaccgtcaggcagaccacacagacgcatagcatcggtaaccaagatcaatccatccgggtgcgcattgtacgcgatcttgatggaagtgggatgcaaatggatgccgtcggcgatcactccgtaaaacggcctacggcgctcactctgtcccagcagaccgaagatacctgggttgcggtggtagaagggccgcatggcattgaacaggtgggtgaccatgcgggcacccttgtgcgtggctgcgacagcctgttcataggttgcatcggagtggccggtggagtagatgatgttgcgcttggtgatttcgggaatgtgggccatcatgttgccgacttcgggggcagctgtgatcatcttgattgggctggcgctgcccatgttctcttcgccatagcagtagatgatgtcgtcgaaggtttccgcggcgcgcagcacttcgggcttgtggataccgttgcggttagggctgatgaaggggccttcagcgtgtgcgcctagtgactcggcgccgtcttggggcttatgagttcctgctgtggggccgagggaggggaggacctgaaatatggattagtatttcttattctcttccctggatactttgcgctctgcttaccttccagtacacctcgggggtggagctcacgagcgtcggcaggtaagaagtgacaccggttcgggccaatcctcggtttaccatgcgcaaaccctcatcgtattcctccttcgtttcacagggtacggagaaatcaaagccatgagcaccgttcaactggacatcgatcatgcccggggcaatgatacggccaccgaggtcgatgatctcatcgggggacaggtgcaatccatagaaagcctcttgatccttgaggatctttccggtcagagagtcaatccatagatctcgctcgaccaagttcgagccgcacaccaggcgacaattggtgaacttggtaatgcgcggggtagaagtcttgcccggcattatgaatgttcttatcagatcagattaagttgggtagttcgagctcgagggaaagaatacacaagaagaagggggggaaacccaagtacataaagatctagacacaatgatgtaacagtagactgcgtgacattcggcatgccgatgtggtatacaacatagcccatagtaactgttatcgttgcttatcggccttatcgttacgtgtaatctcccgtacgtatcaatactcggcccgtaaattaccaaaaccggccttgacaataccgtcacggcccaactgctacactccgcatgcgggtcgtttcccttcccttctctttctcaatgcaacatctctcgtcgtcgcattgcaaagtggatgaacatgacatttcctattatattatgactcttttctaatttccctggtttgcgcttctccagatgactccatatttccatgtttccttatctcccttgacattgtcgcattgaaaatggttactaagatgaggcaaaccgggagactcggttaagttgcatattaatttatctactaaaagtccttagcttcgtcctagtcctcttcttatttagactttctcttggcaaagggattagctatctacattcttcaccattcttcaggctgtttctcacgtggcgaacattctttcggccccttggctcgcttgttgatcgctacagcttttttacccctgtagatctttgttctctacaaccatgactgagccggggaagcaaaaagctgagaagcacacggatttgccgacacatgcaatgtctgcgtccgtatctactccgcaggacccggagtcaggtgtggaccaggcagtgataggtcccgcttggatgtacaagccactattcaagattggcaaatgggaggcaccttactttgcctcacccgaaatgcaactatatttggtgtcatttgtctgcttcttatgtcccggcatgttcaatgccgttagcggtctcggtggcggcggtcaagtgaacacccacgatgtgaacaacgccaacactgcactatacagcactttcgcagtcgtcggcttcttcgccggctccattgccaatcgcattggtctaaggctcaccctctccgtcggcgggttcgggtactttctttatgttgcctcgctcctctcgtacaatatcaaccaaaatgcgggcttcctcattttcgccggagccctgctcggtgtatgtgctggtctgctatggtgtgctcagggcgcggtcatgttgagttatccacatgagcatgagaagggaaagtacattgctatcttctgggtgattttcaatttgggtggtgtcatcggtagcttggtacgttcacttgcatatctcgaatcctcagaaacaatatattgatatccacagatccctctcggtcaaaatatgcactcgaccgccggcaacgtcaacaatggcacctacattgccttccttgttctaatggctattggtttcgttctctgctggtgtctcgtcgattgcaagtacgtcaagcgcaaggatggctcgcgtgttatcgtgatcaagaacccgacctggaagtccgagtttttgggtctttgggagacactgatccacgattcgtacatcgtcctgatgttccccatgtttctagccagcaactggttctacgcataccatttcaacgcagtcaatctcgcctatttcaatgttcgcactcgagccctaaacagtcttctgtactggctgatgcagatggtgggtgcgtttatcttcggcaagctgttggatttgaagggtctctcgcgtccgtggcgcgccaaaatcaactttggcattctgctcgctgttaccatgggcatctggggcggaggatacgcattccagaagcgctatacccgcgaaaccaagggtctcggcacggatttcaccgatcgcggctacattggacccatgttcctgtacatgttctacggattctacgacgccgcttttcagacctgcacttattggtacatgggttctctctccaacaatagccgcaagttggccaatttcgctggtttctacaagggaatccaatctgctggcgctgccggaatgtggaggtaagcaaccattgctctttttgctctattcttcactaactaacatactttcagcttggatgcaaatgagaccgcgtacatgaccgaatttgcctcttgctggggtattctggtcggtagtatgcttattgcctcacctgtgattttcctcaaggtcaaggacagcactgccgtcgaggacgatctgcgattctccgacgaaaccgccgccgacgtgcggggccataccaacgaaatgtctccgatagataagcctcacactgaaacccatacccctactgggactctccccgactctcacgaggagactaccaaataatgagttgtcggcgagggggacaacccttaccggtcatttatcaccactcggtcaatattcgatttgatcacctttatcactacagtgtgacgaaatacaatacctgcatttacgaggcgtgtgacttttttatgctcgcgaaaaaaatcctggccacaactgcgccagggaccgtgagtatcatgttcaacaaatactcaatctccgtcaactccgttttctttaataatcttgtacatgatctgcgttggatttctctgggtgcattggctcccattcgggttgtactttaggtctgccatggtcataggagtagtctatctaatgcgtacataatgtcatatctgcaaaccacaatgctattgaatatattatcaatatctaatcaggtctgctcacgacaactcaccaaacccagaagcctttgtagccgtaggcaacggtaccgaagcctgggtatgagtcgccgtcttagggccagtcgagccagaattctgcttcaccttgtcttctcccttggtcaattcccacccattcagagtacgattaaacagctgcaacgcagccaccggctgatagtacggcacctcatgaccagactcataaacacgggtgaaagagaagttaccatactccctcgtctcgccatactcgacaccatcgacgaggaagggcgcataaccggccttctggaactgcttgctgtgcttgtacttcgccgcgagggagatggcctcgccgccgaaccagttgcagatgtagtctgcgtcgccgtagatgagagcgacgcggacgggacgggagaggatatcctctaggtcttcgaggaagttgggccagacgaagtcgccggtttgctggaaggcgaagtagacttcgttgttggattgcgtgtagtttatgtcgacgcctagggcgttcaggaccgagtctttggcgaggtagtttatgtagtagccttctggggttgggtcgtcgctcgggtggcggatgtcataggcgcctcgctcgccgaagacgtagtaggggctctctagagttagggattgtgtcagttctgggtagattttatatggagtcggggtatatcataccgacgttatctcggcacatgttggttgcctcggtgcagagtgcgaggtcggatagcgaggtgcggtttgtaagcttgcaggttgcgatttggtcctggcagccgtttggcatttcgttggcgaatctcatgtagttgtaaactgtctcgttgacctgcattatttgttagtgtgaaattagtatcatggtaactttgaagacttacagccttgatcccataggtgttgttcacggcaaattcagggtagtgcctggcttgaattccttcatcgatgataccattgatgatacccaaggtgttgaagtcgagttgaatgccgtgctgggtgccgttggcaatcttaaggttctcttcatagaagtgatcgaagaactgccagtgttagaacttcaacaaaataggagctactggttgactcacggcagggccataatgccttgaagaagtcagcaaggatatatcaatatctcgaacagacgaactcaccctccatagctttcggtccacaaattgaaactcttcgacttgatcttcgaatccagcttgggcagaccacccaggaatccctgcaggacttcccaggtagctttggcagcgagtacagttgtatcaattgcggtagcgttgatgactggatagcgaccatcaattcctgcaaaggacgggtcttcatatgaacctgtgatagggttaagagtgccggccgctttctcagcgtaggagaaacctgtgattatattagccagatgacctagaaagagaatagaatagaaagatatccataccaacacccaatggctgagagatgaatagcaaattcgagacctcattccacgaattcttgttgatataagattcattattcttgttgacaccacacggacccaattcctcgaacaatccaatcaaagagtcactgcccggtccaccatttaaccacaaggtgattggcgcattttcagggtcatggcgagcctcgaaaaaccagaagaaagtgtgctctgtgggtgagaggtccacataacccgaataggagttgacaccgggggtagtttcacaaacaccctctttgccaggctctttatagcgaatggtgacattattagccgtcttgatagtcttgacgtgtgttggatgcttgggcagctggcgacggatgagggcctccaagccctccaagctatctgagggcacggcaagcgccgccacagccggtaataatggaatccagtgggagacacgcataatgggctatttgtttaccgttacgagtgaggattaccggggcgtgctcgggataacttatagtcccagaagaggggaagtaaacaagaatcgtgcatgataagcagctcacgcaatcgacgattggcagggaaagctgaatgctaagccgggtatttacttgatctccgtgggagctccggagaaggtagcatccccgttaagaggggaaaagagtcaaagctccaccaactcagggtgagaggttcagttattcgactaggttaggcggggagggaaaagatcgacggcgctagattataccctgtaggctgtgatcgaatagcaaaagaccagacatctccatgggctaatgccaagagctgttgggctccgagacaaggatgtcgtcttccgtaaagcaaactattatgacgtgctatgtttgatagtgtattaatgtgttgagaaagtagattgagtcatataaaggtggtattgtctgcactgcaggtggtaggtggtaggaataggcctcgaggaccgggttactagggttagtagaatccacctagctatgaacgtattgcggagagtgaaagagccaatttacctggcttgagtagagtgtcacagtaggctgtgttcacaataagcaatctatatagcttggccccatcactagcgaactcatctatcagatgccaaggcgtgttactccagagccagtcgttcttggataagtccgaaacaggctaatcgatagccttggggttttaaagttgacgaagcagaagtttatctgacgttttatatgccagatgggatagtttaaatacaagagtgcgatcaattcaagatgcagaagatgaggagagaggagaagtgggggaatatgtaaccggagttgaatgcaaaccaatcaaacaagcaaatgaaacaaatgaaacaaatgaagcaaacaaggcaaacaaggcaaattaaacaacaatccgtaccctattgatgatgacagtaaatgtaatcactccgtatatatatatatagttgtagttatgcatactaatatgattcgtatatatgattatgtatactccgtaaaaagccataaatataaagaactgttagaagcctgcatcagacaatcatattatactttaactagccaccggtttcaaaatggactgcttctagagttgccgatctcactcgagctagggttgccgataatttcctattattctctttctctaggactaaacacgaactgccccaatacccacatcctgccgagtctcgtatttgccgatttgccacgtttcacactcctaacaatctggatgtctactccgtactccgtacctagatagatgcctcacttggtagataactagaaccggaagaaccattgatgcgaaattaattggtctcagagttctaaagtttggtggtttgatttgattcatttcccgatgcattggtggatgataattggctggtttcatgtatcaagtgggaatgagtgggaatatgccgaataaagaccccctggctaccgcgtactaatactaacaagccccataatgaggacaaatagaattacgcagcaatttcctctcttctccgatacatctttgtcgaaaggggccatcagatcgtttatttcgctgggttacagtgtttcactggtgaaacatctccagacttcaatgttcccagagtaagtcagatccacttctattgattctctttctgatccgatataaagtagtaccttgcataatcacaccagccatcttcaccatgactaaacccgggctggttgcgattgtgattttataaatggataggggcattgcactatatcaagctcgaaaaattgtctaaagtgtgcatcctcgattgtatacttgggacgagtgttagatcaccatggactctatggagactcatgcgacgcccaaggatgctgagaatgagcaatcaatcactcagagaacatccagtccttacccatcccatcccattgcccagctccagggcccgtttgaggaatcaattgtggaaaccaccgatggttctgtaaataaatgggttgtggacatcgacgcgcaaacacggcggcgcgatctacttgagaatgacgaatacgagcggctttgtgggcgaaaatggcgccaaagggcatctgaaaagtgaaaactcatcctcctgtcaagcatgatcaaatcgaactaatccaaccatacagataccatccattctggaaattgatttcccaaatggtcttcggagttcatctcctggccaagagtctagcgaaatccgaagactcagtcatgagaattctacagaaacatgtggatgagttagatggctttctggaaaggaccactgaagactttatgatcgtccgactagacgttcgcactcgaattcagtatctcagagtaccgctaggaaatctcgatgtcttcgatgagatgctggaagaccggaatttccggctatcgattgtcgcctataacgatcagatcgaacattctattgagagattcaccctttccatcacggactcgctcaaagacctacaaaaggcgaaggaggctatgagtgcactatggttctacttccggaaacttacagacgaggattgcttcaagtccgagagcctcaagctttttcatcaggccatgatggacaacatggagggctggattgtcgctatctcaaaacttcgtcgacggggcactgctctccaaaaggccctgacccaacttggcttggcgactacagaaatgcaacgacgagtcggagtagcaagtagaaaggatgtggtgagttaggcttgattgggccttaagattctagcgctaactatcacagcgatcatttattaaacagaccagcaagaccgcaaatcgaaacaaatcaatcaaacaaagactgttcgataaaggacgccccaaatcagaaaaaccacttcctcgcgatccattatcgaagccaaagaggacatcaacggcttctaaacaggttgagaatccttctgctccagctagagctcaaaccgacactcctacggatctacccatcccgagcgatggcattcggcgcaggatcatgagtcgggctagatcatgcagtgctcttatagcagaagccagcgcaggcgccggcaccgaatcaccacctcccctcccatcaacatccggaaagctcaaacgcaagctctccaagcccttcctactcaaacgatccgccagcgtgaaaatcgacttgacccaaagtcgaccgaaaacagcaccatcacaaccctcacgactttcacgcaatatctccatagaacagctccgagcattctgctccacaccacgccctcaaaccggacaatctagagtcaaatcacccacacaagcgcgacaggaggcccacaaccaactcacgaatggccgagagaacatgaaggagcagatatcccaattcctcaagacggaccgcgtggtcgaagcatgggataacgtatccaagaacacatgctgtacactcccgattaccaagacaaaagactggcctagcagcgtcttccaagccaagtcttccaccctagaaaataagggcaacgacacaaacccggacctggacagacagatgtcttggatacaggggaaattcgacgtattacctacatactcattcaaaacaaaacctgacatgtcgccccggatccatgttctatcggtgcagatgacccatgacaacgctaatggggtgactgagcgagaggcgagtttggatttgaaaagtgaattcgggtcgagtattactgcgttgccggttgtaccgtcatccattccaccggttagttgataagagggttttcgatattcatggttgttgacattattatatagattgcactggagcatcgatctagattgattgactgtgctcaaggttgagtatatatgaaagtgtagtacattggacttatagagatatataattatagagaattaaagtgaatatgcatagccatgtgtattaataatataatatgtaactaactattcgtctttcgtatatataccacgtactccggattcgtatagtctcagccctgcccgactgcgccacaatggagattctttcacttttctttctctttctcttccttttttctttataaaacttcgaatacattcctcttcctctttctagtgatttcctttcttttacaaatataaaaaaagtaccaagtaccggtaccaatctgccccatacacaatagggcggccagccaagtcactgtaccttccccaaccccccagactgcagcctaaactgccaaggacccaccgctctcaccagcccccgttgacgtcgaacatctcacatcctttgggattcttacattcttctctttcggcttcagattcttcactttattacttctgtggtcgcaaataattagcccgtcatgccagccctatatcctcgatactggtaggtgctatgatgactcccgtcaagagacatatcactgatccgttacagctctggttactttggggataatgactgctattccacctgggactcttggggtcgctgggtagcgttcgccgtgatcgtcggtgtagccttcctaatcttcttcggtttcgcgtgagtcttacctaattctcttctatgcgatgtctcgcgattttaacaagcttgtcacagatgcttcaacgcacgccgtcgccgaaatcatggccaacgccctctcacaggaacgggatggatggctcctcctccgggccctcctccgccaaatcaacccatctaccagcaacccccatatggcgacccctactaccagcaaaatgcgccccctcaatacaccccgaaccctcagaactacggctactttggtgcgcaaaacgcaccaccacaacagcaaggcatcgagttgcagcagcctccgaatgcgtacactgccaacagtccccacggatatgcgccgcctcctggtccgccgcccaacggcaataaggactaaactctacatcattttaaagcttaatacgcatggctttgaaggtcttccgatattgcatgcctctcgatgaatttgccggaagttaatggtttacggcgtttttaactgcgaaatgtggtctttttttggatttggtcgcatacccacatgggtggatgtttttcctttactacttaatgcttcatgtcttccatgtcacatttaacccaagttcagctgaatttaagtatttggtttgcagcctgagatccctgaaacagcgggacttgagggttatagttctatgttctctcgtacatcgtttctctttaatatatcttggacggtcaaacttgaactgaactgaattagaattgctctttcaaagctaccggctctttttattgattcactgggacatcgtgtgattcgatcacgcggtttcggagcagaagaacagaaggtccaattgatacatggtttgagattggaccagttgaactcgctaatttaacaactcaattttcaattgtaaaccggtctcgcaatatattcagattgatatatttgatatagcgggctgattagtgccccaggcaccccatctccgccctccgccctatatcgggctccgctctgcgttttctcaatgcgacaacctctgagcccatggatatcgacgacattctcgcgtcagtggatcgcggtccaggcgccagcctggaatccgcagcgctagatcaccagctcctcacgcgcttctgggtagctgaacgcgccgtgtcggaggtactaccgtggccggcgccactgatggagcgcataatggatcgcgtgcggatacaggtacacagcaccttcacagcactccctaaatccaaatcactaatgaaaccaaatacctacagatcgaaacaatcgaagacctagccgcatcctcagaaacaaccccaacaaccggaaacacgcacaaccccaatctcaacctccgcctctcaatcctccaaaccgacctcgcccgcagtcaatacatagtacgcagtcttctgcgagccagactggccaaaataacaaaatacagcatgcactatctagtcctgctcgcctcgcgcaacaaaaaccccctcgcatcgcaaacacaatcaaccgcctcctcacagaacccgaaccagcagcccgaggactccgtgccggacatatcagagctgacggatcttgcgccgctgtcggagccggaatcgtcgttcctgcatgcgcaccagacgctcctggcgggccactatgcggggtcgttcatgggcgcgttcccgcggcagctgaggcggttggatgataatgccggtgggacgagtatgatccaggggccagagttgaaagaggttgtttttgttcggtgtcttggggtggaagttcctgttgttgttggaggggaggacgaggaatatgatacgggggttacgatgcgaatgggggatgtttgggttgtgagatgggaaggagttaaggcggcttggggaagaggggaggtggaattattgtgagtcctggagtcttctagactggtttgatattcaacttcatcatagcggagtggcgttatttgggttattttatgatatattttccctacttttgcgggacttgattcaacgatgtatgtatgtcctaccaaggcggtttccattggccgtgctagtaaatatcaaatactaaatcggatggttttctatagctatttcatttctttcaatcccctaaaagacgccaatcgctaagctcagagaaacgcaagcactccgaaagcagacacatataccgagatgcgaggacaccccagatcataaaatcataacaaaccagaaaagaagtagaccagatagaaggcagatgccatcaccgagatcgtatgacattatgcgacatacccgtaggtgggcggatcttcagagattcgctccaggtattcgcggtcaatcagactctcaatgcgacgcttgatcatgttcacgtctgggacaaagcgggcggaaagttgcgaaagagtctcgttcattagttgagcatgagtaagcgttttgcgttgtctgccagatattagttcgtcagatcatatacgaggattatgtgggagtcatacttcataatgcggacgatagcagcttcgatggtaccgttgcgctcgtcattcattttcttttcagtgatcttgcgctgatcttggttctcgactttgttggcaccgccgctgacaactccgatacgcactttcacaaaggggctgtggaaatcattgttgaaaaagaagcggtcagtgggcctcacatccttgctcataggctccttcttcaacactcgagtctttggggcaaccgcaagcgattgcaagttgcggatcaagtcgtggtcttgtatcagggtgcgagttttgatctcgtcataggtgaggccttcgccgtctgggatgtcgttgaataataacaagatgatcatggcgtatgttgacacgttgagttcatagcgctggacctttccattggtgcgtacaaaggtggttcgaagatcgccagtgcccatgctagcctgccacgacagtttgcggccactgtgcttgtcgagataaaatctctcaaagctttgcttcagtgtatcaatctcccgtgggaaaatgcaaggcaattggaccgttccctctttggctcccatgatttccattggccacatcgtactggtgaggacgttgatctccaggtccacgggtttctggtcaggatcaccactgcgcgcaatgtgctccttgtaattggtggtaaggtcttccgagatggtcatatccttgaacatggactcaatgcgttgagtaaactggttaccgacctctaacttcatcttcgaaatcatctgtctctctgcatccatgctgacagagcgtttcatcagaagacggcgtgatagatgtttcttataataagtttcaaatagatccttgtccttgatgtaccgcaacagtgtaattccgctgtctaggagaacgtctacctcgctttctgtctttcccttaatgcccttcttcaggttttcatcgaagaagagagataggtactcggaatttcgcgagttttggttgatgaagttggcgaagctcgccccaattgagccttgcatgccctggtccgaggcgaaggcattctcccaaatgtcatcgaatttccgcttgaggatgagaatgtcatcgacccagcggattgctgacactgtttgctgactctgaggcttttctttgtcttttcccttcgccggctttttctctttttcaccatctttctctgctgatggggctggggcttgtggtaagagtatagacgaagcattgatttctttgcccatttccacaattcgcttgctgaccatgtttgtcaaagcttgcttcttcttgtcgactcttttattaagcgtgtaaatattccgtaacccctccaactgatcgtgatccagcatttgccggacgccggtcccctcgaaattgacgacctcgtcaatattgttccggatgagctcctcgtcaagcaactcaaggaccttcggctctgtcgtgaccgccaacatataacggcatcgctcctcctcttcagtgattcgctgggttgcgaatcggcaaaacatggtagcatctcccatttccaagagccgttgcccttctgtccggtagaactccttacttgtttcgagaaaggctggttcaaactcagtcagataaagttttgagctctcctcctctgtaacagtttcgtagaggccctccaacatttggatgcaatgccgaatgagcggccgttcaataatgtgcccagaacgttccagttggatcatgaatagtatggtggattcgagtacatccatgacagtcaaatcagagccggcacggacgggagctcgtaggatatggtctcggaatagagccaagcaggcaacgtagatggatgggtgagtacggcttgccaccatacggtcctgcgcaaaaagttagcgcattgtatcaataccgtagagcgtgaaaaccccaccatatacatcagaacatcggtaaccatgcccatgcccaattgatgatcttcccaggcatccttcaggacggtgagaaacttctcccccgcctccctcctctcacttgactggtcctgcgcatcggtggatttttgcgcccgcacgagggtcgaagagattgaatcaataatgtgggttctgacattggttttcaaccagtcctgctctagttgtttgacttgttcgtaaagatcggaagcccgcatcatcaacacgatcttgtaggcatggcggtagagctcttcaaatgccagggttgaggcatttttagtattaatttcagtcaaggatgacgagaggactgtccagatagaatcgaaatcttcggtattggcatgggagactccctagaagtatagttagtgaatagcctcataagtttaaccccgcatggtcaacgaactctgcgaggagctcgaatcttgtgacgagccctcattgctgccatcttgaaggcaatgcagtaagtccaagagaaagtgagtgaatagagaacttaacaaaaaaaaaaaaggtgaagaaagaatgcgctcttctctccgcggaggccaaccccggaaattctaaagttccggctgtcactgaccgagcatcgtcatttcacctgtgctttttctttttctctcaagttttgtctgaagcttgcctgaatactttctctctgacttgcaaatatctctactatctttggacttatttctctgtcagctttcaaacacttatcaccatgcgccctttcaccccgggtctccgcccattgaatgcccttctgtcgcaagcacagtcatacactactgttgcgcgcatacaatcttcacgcttcctctcaacacaatctttctctctaaactcagctcgcccatcatctcttctcccccgctcgcagcgtatcttcctccaaacccaaatccgatacaactcccgcgctcctcaccctctcaccgaatcacccaagacacccaagagtcaggcggagcaggaggctgaatgggaagcgcggaaccaggagcgtcgcaaggatgaggaagcctatcgcattacattcacgtgtaagccgtgcggtcatcgctcttcccaccgcatgtccaagcaaggctaccatcgtgggactgtgcttatccaatgtcctgagtgtgactcgcgccatgtcatgagtgatcaccttggtgtcttctttgacaagaagacaactctggaagaccttttgaaagagaaaggtcagacattgacccacggccacacggagggcaacctggaattctgggaggatgggtctgtgaagagctatgacttggagggcaaggagatactgggagcaagcgatgagggtaagtcggcttgacttcattcgaagtgaggttcctgcatagattattggtggagtcggtgcatattaggtgttttgtttgtcttgttggatgtgtatattatggcgatgaaagactctctactcccagcatggcaggatccaagcatcgacgagaagaaggatatatattgggggctttgtacattaaaaatcactttgactgaattctcagtcaactcttaattttcaaggacaaccctatcttcaaagacgacatattgagaaaacataagattgtgtacagaagaaatcaaattgttctgagaaggtatatacaatgcaagtataaatgtagtaatccattccaccaaaacgcccagttttttgtatgccaataacaccatttcatgacacatgcaaatagatgtcaaatcctctaccaaccgcgtctctttccacggtgctccaagcccttctcacggcgcttgtctctcttccgctcgttcttcttcatcttatcacgtccgtgcttctcagggtcagcaacagcgtcgatgcgacgcttagcccgtcgtccttcacggcgttccttgatagccgcctggactctagatatatgctccacgtactcggtggtgccgagtttcttctggagaagatctaagacctcgtgacagttggagacgagggatttgtacgtgttctggaaggtctcgtccgaggagcgtggcgccgggatcgatggatccgtcagatgctgcaggggaatgagaataacgcgcagagaaggccggatctgctcaacctcgatgtggcggataagtgcggcaagaagtgtgatggaggctgtcttgggaatgagggcttctgctcgaccggagatagtttcccgtcgcaaaagggaggaaatctgcttgaaaatgtagtggatggcagatctgttgtattccaccttggcttcctcctttgcctctccttcagcttcactgccagcatcctcatcctcgtcctcatcttcggattcaacatcctcacctgccagctttggaagctcgagtccgttttgagaacagcaacgtccaaggaagacagtgttgcgtacactctgcatagcaagttcctcggcaatgcccggggtacgcagactgcgaagactggcgcgaagaagctgcagcatagctggcttgtctatggcgagaccggaacttccagtcaagggaagggaagcgtaacccgcagcggcatttgtcttggctagatcagccatccacaagcctacaaggttcgcagcacaggtcttgacccatgcgtgtgggaagaacaggcactcttggacagacgtccagatagaagcgcattgcgggctcagagcaagtgtggaagccgtcttgcaaagctttgtgaaaagttgcaaggcatagtaaagagcttcccaattgccattctcatgatcatctagaacgggctgcatcaagccagggaggattccgatgacaaatcgagcctgtttatctttctcggtctgctcggcctcgaagtagatgcgcatggcctgcaatccaatactgcataaagccatgttgtcagtctgctccaaccacgaccgaaggggagtaaggatagtcttcatctgctcccgatccgcacgattgaagaactctcctagcaatgtaccagccaactcgcggcattccggcgagtcgtcattcgccatagcaagaacgataggcaggaagaaggtgctaataatatcttgtgccaattctgggccggtctttgaaagaagcgcgtgcatcgcctccatgactgactgccgcccggactgatgcttgtaatccaggttctttgcgaagaaagcgagctgtttggtccatcgactctttgcctgcgggtactcaatcagaaaatgaacataggttccgcgagcaagatcccgcgcagaccgagtttggtttgtcaccatcatggtcgcgatgttgtccataagctcatacatctccggaacgacgagtttccgggacatgactgcgcggatgaagttgaaagtcacaccttggcgatctggctcctcaatgtcggaagccagacgcttgagcaagtatgcgagatgtccgtcacgaagcttggtgtcctttcgttcacgcagcatggaagaaatcaatttcagggacgcttgtgccgcttcggagtttgtgctaggagactccttaacaagcttgactgcttcggtgaaatagacgtgtgagttctcgtcaatctccggtagcggaagcttgatgatcgtggatagtaaacggagagcagaaaccttcacttcctcttgagactgaacaagcgcatcaccaatgatgggaatgaagcccgacaagttagaagctgtcaacaacgaattgaacttgttgaggatagcacgaagcacatccagcgagaaccgggtcagcttgtaaacatgtgaagatgtcgtacccctgtgctcgccccgcttagctccttgcaatcggatcaagaaccgctcctcgtatctggtcttgggcacagctgggcccgcatctggagcattgtcccgataagcctctttgatgacctcgtaacagaagactaacatatcgcgactttcggcgtcagggtttctcagaagaccgatgccaatccttcgcatgagctcatcaagcttgttgacgagcttcgaattgagcttttcgcgtaggagtgcctggagaggcctaatcaggtttgacaagtggttgatagttgagatcttagccagaagctccatagagtcgtagctcttgctgctcttgacctcctgcattttactggtgtatccttcggcatccttttcttggccgactgtgccaaaggtatcatccatcacaaccgcaaccagttctttcaaacagtaatccaaatctccttgcttgaagtgatcggtggtggtcacaagcatagagtgaacggtgaatgagagaacgtgaagctgataacctcgagcgagcacattacggagttccttgaggatgtagccgaaataaacaggacccaaaaggagagcgagctcattgagtgttttccgtgcagtatcacgagaatcctgtgctttactcttgagggttgcgcagacatctagcaggactggcgggagacgaatagccagttcttcttcggggagaatcttgagaagcttgacagtggtaatcgaagccggcaggcgcatactcatttccttctcctgcttgtggtgaatgtacttggtcaggaaaggaatgaagtttgtggtaagctctgttgacaccttcgcaagagaaggaacagtcttggcgagggtgcacatgggcagctcgacaacatccatcttatcaatttcaccatcgatctggatttctgtccctctctttcggttcattgcactagacagcgcatcggacatgcggcctagcagtctgaggatgttcttctccttttcaggcttgcttgccatgtagctgcggtatctccgaaagtttgctcggaactgaccccattccaaccattcagagagaacgccaagggtcgcaacaccttcggcaatcaggttgtgggcgttttcatcagcagcatcctcgaagatgaaatgctcaatgaggggaatgaagatggtgcccagattcgtagcctgaatgctaccttgagctgcgtctgcagccagacgtcgcaatgcacgttgccggcggtgctgttggatgtggagaatgttggtgaagaaagaggcctcttcatcatcgccgacaagaagaacgtgcatgtcctgcacagcaggtctggtggggttgagcttgacgaagtagccaatgactgcgacaacttcagagcgaataagttcagacttctgtcggatgccgtattgcaaagaggggaacagaacatcattgatgagtgcctcaaagtctgcgtctggttctgtggacgctctgtcgatgaatcgtctcagaccgaaggaggcgctagatcggatagaaagctcatcttcatccctcagatggaaaagcatgttgtagagaagaggcttccactgcttcgcgctcagagtttgagacagttcgtcgctgactgttctgaaagcctgcagacgtctggcataatcgggttcgagtcttttagttgagcgagagtttagatctgcacacaagtcggcaacaatcttgaggttctcgtcgtgcgtagcaagagcaccaaaaactcgggccaatacttctctgttcgcgtcatccttgaagtagtcgaacatcgagcacaccgcatcaaatacttgttgcgcgagctcggcatcttccttggggtcccataagggcaaaaagtgttcgagaatcttcaacaaaccagacttggttctggggctaacacgatccgcgggctgacgaagcagatatgtcgtaattccgacaagactagcggtctctttggaagattcgacgcagggagcgatcaaggaaagagtattgactccggaataaagaacgggcttcgaggggcctctcttgagaagacgaccgaggtggaagagagcgtgctccaggtagggagagaggacttcggatttgatttgctcagctgggaagtcaggcatctcttcggtttcctgtaactttttgtccgtagactgcgcaactaacggaacgagaatctcatccaagataaagaccttgacttcatcgcgggcagattcgaccgcgagacagtcaatcaccttagtcaagaccttgtcattgtgctgcaccaagtagaacgttgaccttggaacagcggcccaagtggagaacaatcgtagaaggcccgaaacaccttgtgctgtctcaatagggaattgatccagtctgctgtcaatcatctccttgaagatgatacggacgtagggagtccaatcatgattcgggacaattgagaagaccaaattgagacagcgaatacactctgaacgaatactttggagcacaggcaagaggcgttcatctgggcgatcgctaccctcgttgtaaatcgcccggcatgctcgcaccaaacagtagacaaccacatccatcgtctgcgatgcaaattcggtcatgcgggtttgaagggtctcaaaaacagtatcgatcagcttaagcagacccagctgtcttcttggggttgtcaactcttcctggaaggcagtcggatcgcactcatcattgtctttgacaacatgaacgtttgcaagaggaccaaatgaaagctgcatgaaaagcccaaagtcgtgctctgaaaggtgcgagatagttcgaagaatagtctttcgtctgccagcttggccagcggccgctgaaccagccttagagatcattcgaccatagagtagtcgaaggacaacggggaggaggacaacgcggtgctcttgttgaattagactttcttcgtcgccgacatgcacgaacactgcaagctcatctttgaatctagcctcatctaagagattaagtaggttttcttgatacgggcgtacattcggatctttccaagtgaaaaggactttcagcgcatgcttctgcagatcagaattaccatggcacaggagtcccagaactgccgcatggacctcgggtgccttaaacaagacaatggggttgaggaactgcgcgaacaaagcaagcatcgacaatcgatctcggaatccccaacgcacttgcgcatcatcagtctcagtatcttcgaccttcggctcgccagttgcgggcgcgtcatcttggtcttcgcgcaatgcccaggacaaaaacaatggcacaatctggcgcgagcgtttctcagcaacgcccggtgcagcgttcaagacacgaagtgcatgggttcgcggggaagcgggaagtatgtttgcgactgtgtggtcttgtttgaattgttgagatagcacatgatacggatcctctgtgctcttggtatttgcggcgagtgttttttcaatcttggcgacattgtaacactggaagtggctcttgacgaaagagctttcgtcgtcttctgttggagtgtcgctggacgcttcggaatcccgctctgacagccactggatagacaaatcggacacaatcttctcaccctggggattttcgctaatggtctttaatgcagcagcagagtcatcccacaatggggccaacttcttcgagaacaatccgaagcaaaagtaagggaccagggtggccatccatctgcggtgagcaatttgggggtagagaatcgcaagtttgcggatatgcatagagatagttctcacggagtccattgtcagcgggctctcttcgacttggatggctaattccacgggcgaggggtcgtctttggcaaggcgaacaattaattcccgtagaatctgaagagataccagcctcagcctgtgcgatgggcttgccaggttcacaattaaatcttgagcaaaggcttccagggtgggatgttcgaggtctgcggattctgggagagaggaaatgaaagtaagagcaccctccaaaaagactggcaggcgagagaattttgtagcagtggcgatgattggtttcaagaggctcgagtcaagctctccaactttgttagcgagttcgacatacgtcttgaaaccttgaccaaggaaaaacactaggcccttcgtctcggcgttattgccttcagctgcaccatcttggaacgctgataggaggttactatgcaacttagagaccatcttggaaattgtagcagaatctgcaaacaaagagatagcggctggaagcttcaccagcgcattcaagaaggcttcatcttttgtggggtattccaatgaatcagtgatgcgggatttgaaggcatccgggcaggaaatgtagccaggttgcgagatctcggacgtgatgcaaccagcctcatgcaggcgtaacagggtgaaacaagtctcccactcggatttttgccatgatgaattaataaacttctggaaaggcgaaagaagcaagctctggaatcgctctgatccccactctgagaatgttgcgcagaagaataggaaatattttgaaagctggcctgtagacactaggtctataatagggcgaaggaaaggtagtaactcgtccatgggggacatttgaaaggcatatgcaacgctggtaaggatctgtaatatcgtttctgatgatacatcagatgcggacacctgctggaggagggacagttgaatctgatgaacgatcttccagttttggattctgacacccttgcgagtggtcacaagcaggaacattatacggcagcactccgagagattgagattcggggttgattttgaacgatcttcgatataagccttgattgtgtcgagaatgggaccgaaggtatcgggagtcgtggcgtggacaagactgacaatcagaccgaatataacttctgcaggatcattgtggttttcactagtcggcggcatctggcttagaacgcaactgaggatgtccatgccattggagtgaagcccgttattgactcccctgatagcatcggagaacatgttcatcaatccttccctgtagttctcggtatccttgttgtcgtcggcggccttcgagatatcgtcgaaaaggaacgagaccgcagtctcgaggggtgctttgttcttgtagtaaacaagaccggcctttctaataaggaacgacatcgactcagcggcgaacctcgccacaaatggcttttgtcgttcttttccgagatatggagtcattatacccagcagctgccgtaggtctggtaccaacagacgagaaaggaatttgaagatccatgcaagacaggtgaaactccattcaacgacctcaatatcgggatgtgttgccgcaacggacgacaccagtgtcactgccgtagcaaaatgtttttcgaacttgacacccaggtcccgagcaaattgcgcaagcaagctcaatagcggctccatagagagctggtctctcttctcgatgaattccaccaatagacccataatcttttcttcatgatacagaacttgcgcaaagctctcggaaagagggttgacacgccgtacaaattgtgtaaagttgtctgaaaggttcatctcgaaccagtgatcgagagccgctcggaaataagaagatgtttcgtcttcatcttcgccgaaactggcgcggcgcacgcggtggatcgggtcgattttgagcttggtgatgcgtgatgaaaagccctcgaatcggtggttctttgtggtttcggtgcctgtttttaggcgcctaacaggctttgattttgtgcctgtccccaccatcttgacgggtctgacgagcagcactgttcgtgagaaaggtactggctatttttttttggctgatccgcatggaatacaaaaaagttattcgggacgggatttatttattccgaggccgatatctacttacatcacgtgctgataaggtggcccaagctcctgctttcgagaaacccgaggtgttctatcctgcgcctagttgcatgtagtcgatctttggtggcagctttggacagttcgggtgtttgaaaaatcttatacttttcgggtcttttgtctgtccgtttccccccattttggctatcttttatcaaattatttcaacatcttcctgtaccgagtcgaccttccacaaagacagactcaaaaatggctcccaaatggtatgtatgtttaggtctgcatgtattccagtctctaaccaaatctatatgtagtattgtcattggcagcttaaacggtcagatacggcctttgttcagcaagttagccaagctgcagctaaaacaacatttctcctttgcgatcattcttggcgacctcttcggtgatgggtcaactgaagacgagctcactgatattaccgcattgctacaagggaacattactgtggcgtgcccaacctacttcacgcttggtaaccgaccacttccccctcaggtggtcgaaaagattgaagcaactgatgaagtgtgtcccaatttgttcttcctgggaaagcgaggaaccttgaagacaacagatggtatccgtattgtggccctcggtggaaccataggagaggcagagggtagatccaaacccgagagcaatgctagcggcaagttccaacccacatacagtgaatctgatgctcgtgcactgttcggcattcacaaaaccgacattcttatcaccaaccaatggccgaaggatgtccgtctaggatctaactgcgaggtctctggggataaggagactgtgccatccgaattgcaatgcattgctgatgtctgcgcgactctgaaaccccggtatcacttttctcggtcagacggtgctttcttcgagcgtgaacccttctttcacatgccagcagaggatgaaaatacctaccaactcactcggttcatctcattgcctactttcggctcgacaaaaaatgctatttatgcttttagcttggacccaacagcacctttcccaaccagtatccccacaggctccaccatttgcccttggtcggcggcgcaaagtagacgcaaaatgctcccaagccaaaatgaatcataccagcgctacgccccctccgacagagatagagacccagggcaccagcgccgacacaaagaacgcgcccctccgccaggcccggagaattgtttcttctgtctctcaaatcccaacattgccacccatctcatcacctcaatcggcaatgacagctacatcaccaccgccaaaggacctttgcccacaaccgacttcttcccttccctgggcttcccaggccatatgctcatcatcccctttgaacactgcccgaccatcgacctaatcttcgacccggccacccgagcttcgacatttgccgagatgcaacggtaccgcgaatccctgcaccaaatgctgaacgagcgttcaggaggcaagctgggtgctgtcacatgggaagtcagccgctcaaacggcatccacacacattggcaattcctgccgatgcccgtggagaagatccgctcacgccttgtggaaatggcattcaagaaggaagcctcgaacctagaatattcgacgttcaagaccgtgccaaaccccgatgaaatgcacaatcatcatatgatcgattatttccgagtcttcatttggacgcctgcgctcagcagtgaagccgaagccgaagccgataattggtcttcacctgagcacaaaggcgtttggaagactgaatctggagaagagaatgttattattatgaaaatcctgccagagacccggtttgatttgcaattcggtcgtcgggtcatgggcaaggtactctatttagatgaccgtattaactggagggattgtgtgcagaccgacgacgaggagacgaaagacgcggaggctttcaaggaggctttcaagaaacatgatttcgcgatggaggttgaggagtgaatgtgagatcagcaagtttcttctttattttccaggttcatatatgataaatgtgtggtatggtgatcaaggggtctttccagggggcgcgtcttcggaaagctcccttttcgtgtatagtacgatgaaatgtgacatgagttcaaaattgaagccaaaattcaagtttcacagatttttgcagattccacgcggaccacatataaggaatactcatattaatgcgttttcctatgctgtttcaagcactgagattctagcgatgcgaaactgctagactatgcccggatgctcgagatgctaaccttggaagatacctgcgcttttaaaaagcctaacgcttaatcaactgctttatcgtcaattactttagcaactacttaagcaaccaattaagcaaccgctgtagtaactgctttagtggttaattaaagaggatcgtcgtttcaagtctggtgaatgtgataggccgaaaggcgggggaaactatggggatgtgtcccttgttgaccctgtcagacctcatctcttggtgtttcagctatttccctcttctctccttcgtcgaggctcttcttccggccatttggcagtttcaatcatttccagagtctgcaactcatcgtttagtctttttttggatcctctagggtctcacacactctctctagtctttcttcgtcaatgtctcaatgttctattttggtaacttgctgcctgttcgatccaccctcttgaactagcatctattcactccatattcgctcatattgaatctattgtgtgacttcgcatctacttctacactcggacgcgccccgcctcttgatacctccgaccccgacacgcttgtacatctcattcgcgctacagttcacactagactacgtctagttttgaatacattggctgttcgcagccattggaaatcggatgattcccttatcgcattgcgcacccgctattcatttacaagatgagtccggcaaatattacactatgggctcgagataccgcgagtgatctcgcggcggttccaagcaccttctccagctgggacaaatgtatgaccaaatcgtactgcaagtgagttccctcgagggatatgctacctttgcgcatggtctgcattctgcatgatactaattaattggcgcaggtggcccgtcatcgttggtataatcgtcggttcgataattttactctccgtattagcttgcatcttcaattgtctctgttgcggctatcaaggttgcaagtgctgctgtagctgttgttgtccgtcaggcaggcgcaggaacaaaacgcctaaagactttgatgaccctcctttccaccagcaccagcctccgccagcaccaactccagtctatcaagcaccaccagccccgccctcatatcgtggtgcgcaacagactgcacatttcgacgcgcccaagtctccggccgcccatgttaatgaggacgccctgcctgaaatgcctacctgggctggtgccgttgacaagcatgttgaagattcgaatcattacgacgacgtcgaaatggagcctttgaatccgccgaacaggaatcagggtgccggtacacctggtgccgtttactctgaccattcacccaacccacccatgggtgcagccgcggccggatacagaggatttgggcctactgatccgcgtgtacgccggtcccccggcccacgagcagccttgaatcccgtccaagatccgtacgggcggcgctcgcccggtatatcaccatcagccccagcagctggctatggtgccgcggcctatgacccctacggttctcgctctccgacatcgcctgttgaagcaccagtccacaatccttacggccagcaacaataccaagattcctacgctatccactcctatggcgcaggaaatggctaccacgccgtaaccgccccctcgcccgtggctgcatacaggccgcacacgaactacagccccgtgccaatggccttctccccatcctcggagatagaccacgcggccgcgggcccaacatcaggcttccagcgccagccatcctttggctctagccagtatcccccaacatatacctcccagcctccataccgcggcttctcccccggtgcatcttctacgccccctcctgctttctcggctccttcaccttcagagtacactacctataacccccacgccaacaccatccccattcccgagcccgacaacaccagacctccgagtctgttgcagagcggtagaaagcctaccgtcaatgcttatggcaacttttgagtatgacccttgtcgatcgaggcggtttcatgaccagaacgttttttttttgttttctcttctaccttttttcgtttgataccattctgaggctttatttgtcttcgttcatcttttatacttacatgccatgaccttgggccaaatttgggcctagaattaaagatatttcctttctttcatcacttctcccacttgtactcttttgcatccacgggtcggctttgactcgttcgacgggtggcgggttttttgaaaaacaatgcgcatttttgcccagcagcatatgtcccccatgtgattcctcttgattgcggagcgaagcgaagcaattaaatcataacctcgtgtgtatgtcacgtgaccgttcttttctcctccaaaatcattagttagaatcaatgcagtgaagaagtgatgggctaactttggcagaataatccaaccggcagaatatatagactggcctaatctggctagacgataatttctattacgtgctgtaggctagttactcaagcggttactagagtggttagttacacgagttgaatgtttacgaaggacttgaagttatttgaatatttttttcattctcacaaaagaaaatcaaacatttgtgaactggttgtctcctccgattaccctttccagaccattaaaatctcacaaggaaacatatccagagagaaaaggcctgtaatacacaagcaattctcgttatgtacagctgtaagagtcgcactcgatgcaaagattacatcctcaagatcctcctcactaccccaatgacacggttcaaagggggatattatcgggacaatgcatgaaaatacaaatgctcctgaagaattcagccagtcaagggactggcgttgagcatcgagatgcaaatttggacagcgtggaatgatccacagaagaaagtgtgtacatagaaggaccaaatagtggattaaagggcgataatggtgtcaaaagaatgtccggagagaaaaggagatgccaaagtgtcggcagaatgttcgatgggaatcgtccttgggggtattgtcttcatgagacccatggaggtatgagaaaatggaaatcaggtgatggtaggccgggggcgtcttcgtgcgcattttcgggtttgaaagttgcggtgtcgtaagtagacatatgaaatgggactcagattcaaatgaggtcataggagtcaataacccagtatgatcctgggttgtgggcatagagagatgtggcgagaggccacgcaaggaaaatattgaagcaagaacccatgagttaaagagggtcagccaaggagaggacgataccaaaatgaggtatcaaagagatgaggaaaaaggtgaacagcgcggggtatgcagcatgccaacacgaatcagacgtcagcagaactgaggtggtcgagagaagagaagttgagggtaaaaaaaaaaaaagaaaagaaaaagccagcataaagcatcttggtatgcatcagccaaacaccacgctccaagtacaagacgacaaaaaaaaaaaaacaaagaaaagacataagacgcaagaaaatgcaaatcaccaagaaggaaaggtgagtcccttagtaggaaagcatgcgacggccaggggtccgaacaggcactgggctttgagaaaagggagagcttgggtagcggtttcgatcctcgccaagtcggcaacgtccggttgggctgtcctccatctggggtgattgttcaccaaaggcaaaagtctgggcgcggttcagcttggagcgctgcttgaccttgccaagtccacgctcgcaggcaaattcgtgctccttggcgctcatctcgacatagttctgagggaagcagaaagagcgatgttcagcgaagaacgagctgtatccaccatccagaatgtacatatcaggatatgacaggttagggtaagtatcaacattgatagcgcggtcgtggtgacgcaggtacttggccatgatgggagcccggtgggcagagtactcgcagtgcaagacaagcgcagtgcgagcctggggggcattgaagagttcacctgcgaggcgttccttgtcgttatagttcaatgcaccattgatatggccaccctcatactcatactcgaagcggcagtcaatgatgagaatgttatcgaaatgctcattgaattttccattcatgagttccagaagagtgctcttgtcgatgcgaggcagagagtccgcgcgatcctcagggatgaagtgaggcagcttcatgctgggcggactcgaaatgtcactgatggactggacgggtgtatttgtcgctaccttggcctctttatcggcaataacatctgctgggttctcaaacatgctcaatgatcgtcggcattgcttgcgaggacgcatcatcgagtgagcgggtttgcgaattgaacagggaacgggcgagccgctgctacgggcatgctggagggatggccgcatacggggcggcgccaggtgagtggaagaattgttgcgcgagattgaacgctcatgggggggcgaatccccaaacatatcttccagggaagtggacgtgctcagagtggtcttggccccggttccaaatcggaaggggggtgctttgctctctggtgccggccgggtcaatccaagctggaaagactgagccttgcttctagccagactcggacgcaggaagttaggtcgctttctgctgccaaataagaatccacattagcaaaactgtagttggtggctgaataacacgtgaacttactcagttgggcataaaggcgactccatgggcgactcttgaagagggcttggtagcggagacaccatgggtgattccataggactgcccccgggtgtcggcgactggatctcgatctctgctgtgacaaaaaatgcgggcttgtgaggcagaggcgacatatccatcaggtccatagccggagctggtgaagaagatgggagcggcggggtggtcatcacatcatctataaagtatcagtcaaacagtcgctaccccaccctgccattctcggcactgcttacctcgtccattgacctgaccaagcatactggccgtgaacaaagaccggcgtggtgtggccaactgaggactaaatatagagttagccgggctttgtccctttgaacctcatggaaggaccatggaccagctccacatacctctgatcaatgtggaaattctgagacaggtccgccgccagactggcagttggggatgatcctcgaatgggtttcaggttgaagtagtccgaagtagacttcttcatagacaattccttgaaattgaacgggttcccaccgaatccagacattgagcccaggggataagtggaggcctctgaacgaaagcaatggccaaacatgaccgacggaggctgcatcgcagcgagaggtgaagagtgttccatggccggtgacaaatcggacctggagccaaaagccgacgtagtacagtttctggcaaagcaaccggaacggattggaacaatggcaaatcaggccctgcgcaagatgtctaccccgtactaggtcctacaaactgaggttcaaagaaaaaattgtctcaatgcacgtctccacgtttgcaatttcaacgttatgggtccccacgatcgccgtgacaaccagtccgggaaaaaaaattcctaggtcccagaccctcaccaccaacggccagagttgtgctgtgttcaagacaactagatttagcgggccatggcaagatgtcgacgaggtaggtgaatatggattccagagggcgactatgtcggacgtgattggaggggtcgggggggtagctcgtgggtgctgcaggagggggaaagggttccaagaatatgatatggcttgtcggacgggaacaacaaaattgaatctcacgatgccgagtgaggaatgtcgcgagtagttaagaagaagaagagaaagtaggaacaaagacgatttgaagaaagaagccgtgaagctgaagggatgggcttgttgcaatgggcaacgcaggtggggaggatctccgaatgtacagagtattgagtaatactgcggctccgatattcatgtaatgaatattttaatattaaaaaagggtatactagaggtattgggggtaatcgacgtaatctgggagtaatcgaggtatgtatgggggtggaaaccgctagttccagagtacggaaaaagcccaaaaaagaattaaaatcagactaggacgaaagggaagtcaagaataaacctattaattgactaaaagagactggggaagactaagatcggtatgcaaaggcgagtaaccggagacagtaaaagatagacagtccccatgctctggctaggggccaaatactttttttcgtcgttgcccggggctcccttgccgcagcaacccagcgcctatcacagctcgtcgggttgctggtatagacgatgatgtctcgggtttagctttgtctcccctgctctatggaaggaggatttgtcttgctattacggagtagttatacggagtattacacggagtactattactatgtatgaccagggctacatataactagggctatatgtatgtagttctctcgtcccttcttacgttaaataactatccagtatccaccaaaaaacttttttttctctcccgtgtgtgtccgtcaccgtatgaaccacagttcagctgagaaaaaaaaaacggagccaaagagatcgagtctaatgcagaaaaatatccactttcctattctcgggagaaaatttaaagcttctgcaagtgatgggaagcaagtgatgaaggaagtaagggcgcgactacggagtacatacaattgaacggcttcttttttattgcgttgcactttaacctcacgatatgcttcgaaatccaaaatgctgagaaatgtggtctggaaattagctccattcacaattatagtgcaatatagtgctcgattgactcaactagtgcgataagaagccctcttacccgaggtattgattggcccataccggagcgtgtaaatcttaaagatctcgtcttcgcaatgtgaaaagagttgatcctatctcagccctattaggggatatcaagagccgatctgagctggaatctgtctcctgtacgtcgtacggggtatgtacaatgcggcatcttgcacgggagtgtcaattgccgttgaattgtcgaattgcttcgagatcggagcgtccaacgtagtatcgtgtaaggaatggtagataatctcattctcctctggaaagcgaagacgccatacccgtgctgcccttacttgtaccggcattcttgttgatcaagggttcacgatggcttccaatgtcgcgcatcccttccatcccccttggtaggatgtttgacttcaatatacattaattgcctaagggtagttcgattggagtcccgctgaatggcattcaccgcgctttttgcaacttgacaatgaatgcgattgtatctgtattgccctcgctccggaattagggctaatactcgcatcaaggacaagccgggatcacgatttatgcgattgacacaacaaaccaccggtgaagaacctggtacggtcaacaaccttaaacaagtttatcagtatagatctcctccatcggtcctattcaggctatcagatgcgatatttacaaggtatactccgcactcaatctctcaattcgccaccatccacaggcttatactttgaacaaagtctgcggagtgtgttctacggggtgtgaaactgctaatcggctatagtcgtcaggtcatggtggacactcggctgatgatttcattactttattctggtattctagaccctctcgtgaaacaccggaacctcgggcttccctgttcatggtatgtcccgtcaatccgagatgcatcaacccccaatccgttgaatattaacaattggctgtcctcgctgttatatagcacttggtgcaggcatcttacacaaatccccctgtggcagacgatgcggtgtgctccccgacgctgttcggaagattgtattgcccaggtggcccgtgatactacgtcatatcgactgcacatctatctatttgcgtcccgtgcacagcttgcaaacctgatatcctaatttaagcttggaagtcgaggactaagccgatcttgaaaccttgggaagtgtctcgggtcgcgtcgacgcttgtttgggggtgttttggtctactccgtattgaccacaacactggaatatgcacgaattagcaagcatccactttccaggcgcttacagatgcaagactctcataacatgctagccatgtcagcccaagtgccccgatctgagtatgtatctgcgccacgcctgcagtcatagctaaggtggggtcggagaggaccgcccgatgatgtgaccggtcaattgcatcacaacgccatgtgcgatggagccagtcatgtcagttctccagccgactgactttcgctgctgcggggtccgtcacatctcacctcgtgtcctgctaaacataacctgcatggagagatggatagggttgtctagacctttttcccctccttgtccaagaatactccccctcttcccgaccaatgtgatgtcacgatcgtgttgattgttgatagcgcgtgcagatgaaggtaaacaaagcaaaccagattccaagctaatgcgatatcccgtgatcgcacatgacatcaaagggaaacttgcccagatcaggatttccgacctctctcaactgggattcgatgtgtattttggtatattatacctctagtaagacatacagagtactggaaatacacttaccctacatttcccctgggcttttctatatttgttaattattattctcccgtcccggggaccccgatctgcgccgctattggtatcctttatccgcctcatcggcttcgtgcctgtcagctcccctctctcaaatcgtgctatcacttttctagtgacgccctactccctattgggctcgtatcacatagctccgatcgtggctgtctctgtggaatgcacccgcccaacgtgatagatcgagaggcctagacgccgctggactggtatattcgacagccataagttggattgtactggtttagactttgtctcgtggcatcgaatagcctcttttggtcaattattatgctcttttatgctcttaatactgcatccagacctcaagctaaaccccgtagccacccccgtctttacttaaaccccgtgtacactccccaatatcccaggactccgccagattccactctgaacctccgaacaacctcccaagtcacacagacccaaataatagggtcccggttgcatcaggcaacccccctgaacgcgcaaaatctgacacccgactctacatctatcacaccggttgccagggactcccaggcccaccacgacgtcggactccgtacaccatcaccccgagacccatccgcctacatcaaaaccacctgcgtgattcccacgaaatgaattccacatgttaccaagcacgactaactaacctaattctaaaaaaactacttgaaccatgcagatccacggtagacgatcgctcatccgttccaacacatcgattctgatacagaggtaattttctcccgactccttaatatggattctctcagatgtcgaatggtcccgcccaagccaaattgatagctcgatgcacggttcctggtttcactctctctctatcgcccgacagcccaggaatgttgctctgtccggtcatactcgtatacagatcagcccgggcgggtcggtgcatccgcgaaggcagcaccaagcggagcccggatagtgaagctcggatctagcgcaattagcgggttttcctcggcgacatgcgattgtataaatggatgctgatttcccggttgcctttgacaacaggatagctttgcgtctggactggtgtggtttgaggttgatagcccggctagcacttgggtgatctcgtttttgggacgtcattacccctgaatcagtctggacttctttttgatcccggttgccctgacagcttcgaatacaccgtgttattttatctactgaaacgttggttgcatgttcccatgtccgatctgttgtgtggtatttgaggtatctttgatgcggcttccaggggctacattggagaggtacggaccactccggcttacttggagattgtcttgagggtttgggggctagattgtcttggcttggatcgtaagctgggtagcgtttgactttgtggtttggatctgcctccagaatgctgtcagcaaatattgcttgttggaggccttggagtcttactgagaatagtcacatgctctaatatatatgtgcctggaccttccatatagcttcgcaccacacttggtttcctaacgcggccaacaaatcatgagctccagaaatcctcccgaagattctagaaaatatccacattgaatgaggtcgattgcccgttcaaccccaggctctttggagcatcgaaattcttatcggcttatcggtctaggctagtcctaaataggctaaagcatgaatttttctgagcgacttgaacggccgcaaggagtgttcaacgtgcctttggtttgcagatcttcattatccaaggcctgagagcggataatccaattgttaattcaacctcgcatctatccgctatccccaaaccccccagactcagcaatgggcccccccttcgccggttcaaagaagcgccgccgtgaacctcacaatgtcgacgtgaagctggtggaactctacgaggatctcgctagcgaaaaagatgatatccgactcaaggctgctcaagccctagtgtcgcaattcactccggaccagaaccctgccgatgaacagatcaagaaggtgctgtcgagactcttccgcggtctctgcagtagccgcaaagctgctcgaatcggattctccattgccttgacagagattctgagtcaggtattctcgtcgccgagggagacatcacgctttggcttctcggatgctctgaacctttgggagtctcagtcgagttcctacggcagcgagtcgggacaggttagtggacacacatgagttaaaacgtcgcatgcgctaactaggattcgttccatataggagcaacgcgatcaccttttcggtcgtcttttcggcgctgaagcgatcataaaatcctccgttctgttccagcccaccgtgcccttcgagcaatggactcaggtcgtcgatttggttttcgaactcgcacaaaagaagccatggattcgcgaagagtgtgggtggattatctaccagtgtgtctacgacctggccgcgcgcaagatggaacccaagtacgtccagtctgcgctggaacagctctgcttgcgcgacctcgcccggtcgcccgagggtgttgctatctggttggcggcgaaggatctgttccccgatgctactttcccgagcaagatctggaagcatgacgatcccctggatacgaaggagcgcagcagcatgtcgaagatcatgaaggaatcgggtgctgcgcccagcgagggcgagaccaaggtgaacactgcgaagtcctctggcgtctggaataacaagcttcacttcgcctgggatgcggttctctctcggaccagtgttgaggcgaaggataagtcgaagaagtctcgtatgaccttcgctgatttttggacagaggttgtggacagtgagtacctatctagcggtggaattctgctcaaggcacatggaactgacaaaaagtctctttacagatggattgttcgctgctgcgtcctcggacgagcgtaaatactggggcttccttcttttcaacagaattctcaacgatggcgggtcgcagcaggcctctcagattttcaccaagaaccttatgcgatgcttaacgaaccagcttgctgtggaggaccggtacttacaccgaatggccgctaaggtggccaaggcaatccaggcccgtgtgtccaaagagcctgaattcgcagctgcggccatccgtggattgatgggaaccagcggcaccctgaacttcgaccaggctacaaagaccaagactgtggaaaagattgttgccgaagccaaccacgaggcattggaagagattgtcccgttcttcgaacaacttattcaaaatcccggcaccaccgaggagaaaaccgccgcatccaaccgtcaattcgtcgctggtctccttttgtcaattgttcgctccaaggcttctgccgacgaagacgatgccgaagacctccaagcaagccttgagcagatcctgtctatattcgtgcgctttgcgtactttatggatgccggcaagggatccactgcccctgagcctcctctgtcatcggcgacacaagaactcctgcgcaatcgaatcaactcctgcttgaacagccttatttccaaccaaaagttcgccgctaccctcccgtatgctgtggtgaagcagattcgcgatgcagccaagtctggcgaattcggcaagttcatcatcgccatcgatgagaagctgtcggaatctgtgaaggctgctttcaaatctctaaagaagttgtccagcagggtatgatttctccccttatcagcttttagctacttgtactgaccatcacataggagaagaaggagaagggcatggccgcattcaagctgctttactctatgactatcatgcaggtgtacaacggagacgcagacgctgtatccatgcttgatgagctggagttctgttataccaagttcttgggcgacaaggaaactaagacagaagacgccggcgatgcctcggatgcgttagttgagatccttctcagtttcgcatccaagcaatcgcagctgttccgtcgtatgagtgagcaggtgtttggcgcattcgctaaccagatcaccgagaacggattggaatctttgacctcggtatgtcgcctcaatttctatgagatatgcattttctaactagacctagattctggaggccaaggagagtctcgctggacagcaagagatgtttgaagagcaagacgatgaaggcgtggaggaaggagaagatgacgaggatgagatggatatcgacgaggatgagctcgacagcgatgtcgaggttgtcgaagccggcggctccggctccgacgatgacgatgacgatgacgacgaggaagaagaagacaacgaagaagatgcaaaggaagtcgccgccttcgaagccaaattagccgcagctctcggcacacaccgcgcagacgaagacgagtccgattccgacgccgacatgaacgacgacgagatggacgagctagacgaaaaactggtgcaagtattccgcgcgcgtcgtcaagaaacatcccaccgcaaagacaagaaagatgcacgtgagaacatggtgaacttcaagaaccgcgtcctggacctactagagatcttcgtgaagaagagccacacccgcccgctcgcgctagatgtcctcctgccgttgctccgactatctcgccggaccaacgtgaagcagatcgccaccaaggccaacggagtgctgcgcgagtacacaaaggtgtgcaagggcaattcgctcccgaagatcgaggacgaggcacaggccgaggcgctctgggagctgcttcggtctgttcataatgaggctagccacagtggccctatgggccatgcgactgcttgcagccaggctagtttgcttgttactaaagtgcttgttgcacatgataaggatgctattgcccgtgttgtggatgtttatgctgccactcgcaaggatcaactcatgagcactaagtgtcatgtgcagccgtcgttcttttcggagtggaataactggtgtgtttctgcgagcaagcagttgaagtgatgatgggttgttttatatagagattgcgagttatgatctgtcgctggacttcatgtcaatattattatcaggttcattcaacctgtctatatagtccacctctctctctaccttcctttaaaccctcctcctgtaaacgacgaagctaagtcccggcggtgagaagataacgttgatatatatcactgaaggtcatactgcgcgggtatagggataattatgaaatagtgagggtagtagatagaatatatataataggcctcgcggttccaaagcgagcctatatgaattattagtttataatgcattatcctgcagctgtatgttatcctcatcacaacgaattatagaaaactcccctaaaagccagtaatatatcgatgctcattcgtctcttccaaaacctccaacctcatcccaacctcaatagccccctcattacgcggcgcactcaacataccaaaacaaggcttatacctaatcccctcatccaccctacggtacgaaacaagtgtatcccacggctccttcttattcttgagcgccgtatctggatcaacattaggcacctggcagcgcgcacagcgagccacaatatccaggtcaagcggagactgaataacagcctctccgctaccagcggaaccaataaaagtaccgctagcatttcgaccagtaatgcgaaccaacttccacgaatcctcactccacggcgccccgccgcgaacaacgatattcggacggaaccgctcgacagtaatcgggtcgacgcccacccttaccagacgaacattgagctctgccagcgaagcctccgacgcaatcaacaccggatgcacgtccgcaaagccggttgtttggacgcggcctaggtagcggggggcgccgttacccttcagcacgcgcggagccgggcccttgtagacgagagcgacgtcgcggcgcaggaaagcagagaagggagcgttgatttccttgttgtacctgtacccgtctgtctctgtgtcccagatgtggacggggcccgtatttgtatttgccgctagccattgcggtgatggatgggaagggatgcggatggtatgaaaatgatggtcttggccttggtattggctgggtttgttgatttcgggtttcggtatactcacgaccaactcgtcgccgtcggcacttatcgcggtgcgaatgcgggtcatgtcggggatttggcggatggttagaaacgtatttgaggatgcgtcaatgagcatccagcggcggtcaaggtcaagaccatgctgtttaaggaccgttgattggacttctaggcctctacaggattttatggggtacatgcgcagcgagacgatttcgctggattgtttggggcgctggcgccataggcggagaagtttggtaggggattggactgatttgggccatcctttgaagcgcggaatcaggatgattggaattaggagcagaaggcctaatatcactgctgacaccatgttgtgcgactgaagcatgctatttgggaagggtatacaattacaggccaccgaggtgagaagtcggttttgccaaggggggccgccttatgatgtacggcatattcaggccacagagagatatgtggtactttcagtttgctgtcatactgttctgtcgatatgttgtgccttatcgattattgtatatggtatttgctttaggtccaataatagaactcggaagtatgaattagacaaaaggtaagtacttgagacatgccacatatgaacaccacgtataaatgcaataaatgagagggaaagaaaccggaaatgcacgtataagtccaggagaagcaactgctgaagcgaaccagatattacagggggcaaaaagaacaacatgtacctaggtcgacctcattaaggggtatatgcccaagacacagctgactgcgatgccgcaatctcgttatgccgaacccttcttatcaaaccaacacgcgaccattgccttaattaaggcgagtgcgacaacccggccctgctcaatattcgcatcctcagacgccccagggacatggaggaataggacattgcggtcctggccttgtaattgggccaaagacatgctggtatagaagatgaagtcgcacaagtagtgacccgcgtcattggaaatccgaagatccgaatcgggagcaaacgagcgccacgtctccaggaactggtcatcgggctgataaggtgaagcagaggaggggtcatctgtagcacgacctggggtcagaatcggtggcagacccaaacctttccattgtttttcgccgtccacatagccggggcgaccgtcgacatctgtgatgttatagtcatctcggtgagctagaatttcgacggagtaatattgccgcggagctgcgatgccgatatgaataatgagatcaggtctgcaaccaccatgagaggcagcaaactcctccagaatcaagggaagagtctctcgaacggtggcatatgccactgggatcggagtgggatgcacatggagtgagactcgacgcgggcctgagtcttggtctttgggtgacggaaaaaggaaagatgatggaagagaggaggcgaccagatatgatgcatttacaaggttggtcttgaagggctggttacactgttagtttcggattaccagcatccgaagtgcagatcacttaccccaaagcctgttatcaggacggatatctcattaaccgaagccgagggccgtggcgggctgttatcgacaggagtggaggatatatatggggcagcagtaccgtagtcacccatgatcacggttattctcgaggtgaagttgagaagaagatgacttttgtgcggggaagttaaaccttggatggccagacgaatgcgggggtcttggcgggatgcaacccatggattctactaacctaattctgttaagctatatataagtgcccaggtggcggccagttagggcttcatgttttaggcttattatgttgtatgttgtaggttggctagtttaccttttcaacaaaaagtaacaaaaagaaaatctcggatgggttaccgagacttcttctccttgtaccacggagtacagagctggtttctcctctaactattccaccgtttaactcgcagaatttgcaggcttctatcattggcacgcttatagattgaaaaccatctgcatatgcaagtggatccaggcggaatagaaaccccggtcaagaattgcctgttcgggtaaggatcgcttaatttggctctcgttctcgcattccaggttaggtttggagtatacccatcaatgtgagctaagaatatgactccggagctttgacatttgggtgaaaggagttggtcagcttagattttattggacctgtagatttccaatgttgcttggctttggctcggttcggttcagcttgacaacttgatacctacgtgggtcccccctggttcgaatatccagtccaagatcgggttgggaggaaaacggagtctcccttactggcggatggctcgggaactattataaatgagaaggtcctcggagaatatcagtttctagaaatctggggtgtcgcttctattgctgtccccttccccccttttcagtcttgaccttgactatggcagtcatcactgaattgctcaacagtccctatgtcgtacagagtgtatgcattgccctagtggcggtgtttataacgagcttttgggcagatatagcaaacgagattccccatagacacattcctctagttggaaaaacctggtgggagcttaccaacaaaaaggcccggcaacgctttactcggtcatctcgccaactaattaccgaaggatttgccaaggtgagtcctaagagaaatagatgacagcattatctactctcaaatatgttaataggcctttgcagggagcaaatgtctttcagatcatcggagccacaaacccgatagttgtattgcatccgaagtttgtcgatgaaatcaagaaccacccagatctcagttttgaagactccatcaaaaaggcaggttatgaaaccggaaataatccctgaccttggctaacttgtgaatagacattttttgataatcgcattcctgggtttgaaccatttcataatggcacctctttgaaagctaccgtggagattgtgcggaccagtttgacccaggcgctcggtatgcatgtttgcatctatctcacccgagagacatgattgacttatttaaacagggtccatctcacttcggctctcaaaagagacaggcgcgatattgaaggaatccttgcccgccaccgatggtatgccgacgcaccccatttgcaaccctcttactgacgcttcctctcttggtagaatggaagccctactacctcgcgcataagattccgtacatggtagctcgcctctcctctctgatatttgtcggagaaaccatctctcacgatgatgagtggatcgatgtttccgttaactatgccattgatgcgtttatggctatgcgcgatctacgagaatggccatctattctccatccggtcgtacactggttcttgccctctacccgaaagctacgcacgcacttgggaatggctcgctccattataaaccgcgagatagacaggcgggcattgattcgcgcgggcaagctcccagcagacgatccacctcgtgggcctgatgctctggactggtttcgcgagaccgccgaaatccgtaataacttgacctttgaccagtcttgtgcgcaggttggattggcgctggcggccattcataccacatctaacttgttaactaacgtcatgtatgacctcgcggcgtacccggagtatatccagccgctgcgtgatgagattttagcggttgctgccgaagatggagttctgaagaagacgagtttgctcaagttgaagttgatggacagtgtgatgaaggaatcgcagcgtactaatccactctcattgagtaagtcatccaggttctttcgatcctctttcgatttaaacctcttattgacaccccaatagcttccatgaatcgcctcgccctcaagcaaattgtgctctccgatggaactgtgattcctaaaggtgccaacatgttcgtctctacgaaaaccctggaagatgacaacatctaccctaatgctggcacttatgatggttaccggttttacaacaaacgccagcagcccggcaacgaacacaagcatcagtttgtcgcgacgacaagtgagcacttcgtcttcggccatggtgttcacgcctgccctggtcgattctttgctgccaatgaaaccaagattatgttccttcatttgctcctgaagtacgattggaaactgcagagcggcggtcgacctccgaacattgagaatggtgtcgaatctatcaccgacccacgagttcagattttgtttcggtcgcgtgagtcggaggttgacctaagtttcctaggagagtgagtattgggtggatgtaagcagcgcattgttttccctttttgttctatacatattggatatcgctaggttttctgatttaatcaccatggaaatgatgttacttataagcggtgggacaagctagattatcgaatgtccaatgtccccatttgaatattatcgagtcatttgaaaaaggtcaagtccaagtcttcgaggtgaccaggcaagactcggctcctcgaaagtggagatgattggcatctggcccacagttctgcgggtattgtggctatccattgtaagcgagatgagatcttgttactaaattgggaatggatctctgaatcggagaatttaggaacattcacagatctcaatgaatgctcaacggggcataaatcacacatatacgccgtggcagtgatatcaaggaagtcgagggtctcgtttagggttcaaatatcgacagaaataccacgtgacaggtaagtatacagtatatatacggtaattttcaacaacgtgtgttggacgcgtcgcgcgtcagtggggaaggctgaacgtgaagcttctccaaccgcagcgcctccaccaactctccccccaatagggttatatgggtcttttggcttgtctctttcgttgggtcgctcgggctccagggccccagaccgcacaatgagaaattgtgaccgctgatctacggtacccaggtacccgtaccaagatggttcggcttttctttgaaggcgacaaaccaattcactctgaaaggagacaaaagagaaaggattcttacttttcaaggcccgagcgactctaagcatgattggaagtcaaaaaagaaagaaaaatgagctgaaaggtatcagtgcagacgaccatcagctgcacttctatacgcaggctggccgttctccgttctgtttggtacgacatgcaacatacaagcccttgcagctatggtgtgaacggctggagacgatgtcttggatatggagcaacgatctaccatacggagtactcggcactgatctcaaacaccagccccttcatttatgaggtctacaacgtacagagtacagcatacagctgacaggctatacattgtacctttgcaatggaaaagagcaaacagcggtcattcgctaggtgtccttacctcccaagatggttgtcaaagcccggccaaattattcgacggtgcatgcatcaagcaaggccctgatatgcccaccgttctatataggaaagactcgagaaaatctaaacaaagcatagagaacagaattagacttgcagactaaaaagaatttcgaacaacgcataggattttcgcagtgggccgttgaacaagtgcacaagtacagggtaccacgtccagtaggctgtccaccacggggagcgcaggtaccaagtaccccccactgccgcacgcctcaccctacgcccaatcccccatcctcttcctcttcctccttctctccctccctctcttcctctctctctttaccaaccctttccaccattatcgcgagatcttttctcgcacgcttcttcgtttgcggagacgttcttttcttttgtgtgttattttttttcgggtaatgacgaaatccttcattccctactactcggacgggatggagccgcagatgtgatctggtgatccccgatttcaagttgccgcattcctcaggaagcacacgcacaccgagacctcggtttttttttttacttttactttcgcattactcctgtatctcttgctctcgttgcattttttcctttttttctccccttcacgattcacgacattgacgcgacgctgcgcgcttcgagtcgaagccgcgccgtactcatctactctcaactcccccaacacgccctcgaattcttcccagaagtcgcattgacccactgcgattcgcaagatcgcgacatcgccatcatgcctcaacgtcaactttcgcgcactctgccgaagaactttaccttctccctcggcgatgaacccaggactcccgagcgccctcataccgcaatgaatgtgcctccaccacctcgtcactcaatctccaatggccgcctgcccagggttcgggctcgcgctggtaccaacgtttgcgctcgcatggacatggatatgttccacttccacggctccgatgttcccctgccttcaattgaagtccctcaatcgactactaacttcgaagcgccttcattccgtggtttcgcccacgacgagggatatctcgcgccccctcgcgcgcgaatggattttaagacgccacctgcacagatccgcggcacgccttttgattcccacgacactggaaacccgtggccttcgtgggaccacactcctggcccaaacaactttaagcgcccagattcggcctgctcgagtgtgtctaattcgtcaatcgaatccattgaaacgttcgcatcacgaccgtctgtaggaagtttcaccagtgtcgagagcgatctgtttgactcgtacttccctttggagatgtccaaagaacctgagattgagtcgccttcgcgacctcagaagcagtcggcgcatgtcaaagcgtccaagaagtcctggactcgcgatatggatacccacttatggaatacctatcaaatctaccttcaggatcctactatgactccatttaagatgacacctggcagtatcccccctctgggagttacctcgcgtgttgcgcgacgcgccaagaagacatggggacagaagagcagtcgcattactgaatctgtctcgatgcggtctgttgatcccgatgaaatttctacacccaaggccatggacggagagttggaacgagcttggcccaagtctgactctaagactcgacgacgcctcaagatgctatgtcgacgcaaattctcgatttctccccactatcagcgcatcatgcagtctcgcactcccgagcctgtcgccgaaatgttcggccctgccccggatacccgcgtcaaggactttgctgataactcggcctacactactcgtgacctcggcgtttctcttgtcacctcctccgagcccactccactttctcgggttacacaagacttgccgtcaacgacggactggttcaacaaccctgtgtttgctcatgtcgagccaccagtgaccaagactcctagtcagcatcttcgtgtcgaatctgcccctagcatccctcgtcttggatctccattcgtatacagcacttggggccccggtggatcaaaccgccagctccatgaccctagtgctcgacgggagaccatccatgttccgggttatcgtgcccgacgtaacacatacttcgatcaatctttgcccaatcctgatgatgtattcgcaagcgtatccaggcagcagcagaattcttccgatcgggatgttgaacgtcgcttggaggactatgttcgtgacaacaagttccaagacatgggccatggtcgggtccgcgttcgcaatcgtggagctaccactagcgctgtcaatccaagagatatggaccagcttttctctccgccctcgtccctcaactcaggcccaattgagccagaggagactacacctgttttaaaaccccccatgaacccattgttagaccttggcgaaaatatcaaacgccttggctcacccttccgggtcgaaggaggacataagcgtcgcgaagccccgaagcgagtcattagagcacctgcactgtctgatccattctcgagtggtggcccttcatatgtcgggcctcatgacaacacctctccaatgcaggtttctccggctcaagtccgagataaagctccggttcctttgccatacaatgcctcagaggacggcctttctgatgctgagcgaatccgccggcaaatcttgaatatgccttttacgcgcaactaagttgcagcctttttttgctgtcgaatttccaagtatccgtttcatcgtggcgtccatttctttgcgagattttatcccctttgcattatgacttgaacgagataccgacagggccctggtacaacccttgcatttccagcatttttacgacagcaacaccaccatccacgactgtaacgacaagtctgattcacgctcaactccaacgacaaaaaacaccctaaaaaagtgatgggtctttcccttttttcatttgatcacaactcgcacacagtacatcgacatctggctgttggttacctgcctacgaacattgacctcgtttgtcttgtaacaacaccttgtgtgtagttctgtttcgccccttttactcgagaccagcatttctcaatgcagtttcatcattccttcactcacctcatttccttttcttccaacggggctctcacctcgaacaaaataacccaacaccccaaaaaaagttgaaaacaaccgaaaacccatgtctgctgtcaatcagttatcattcgctattttcgcgacccacgttccttacatattctccttatcttcttttctcagaccttgtctagtcgttcatcccctgcatttcctacaaggtacaacatgcatttctcaccatgacatcttggagatgtggtcgacttgataatggtcgccttccgaattacccgtcacacatggcaacgactacctgcatctatgctgacccttgccagtcaacatagatggcaatgcactccctcaaaaaagcgtgcaacgatacatatgcaagtacatagacgaactgaaacgaaacgaacgcgcatgaatattgcagttgaccaacggcatccctgatacgcaagcgaggtgtttggttttcttttgccagcgattcccatttcttcttaatttgcatctcatgatctcaatcttgaagctgatttccccgtgattttacttctcgcttggtgatccacgatttaccaccatgccctcgattctcgatttgatttagctcgcactccatgattccccttgtggcgagccttattgggtttgcatccggataatcgcgtttctttttctccggtctttttcttgcctcttctgcgtctcatggcgtatggatgtctgtctttttttctgctttttcagagcccttttctgcttgatctttgtgatcttcctctggaacttgtgagagtttggccgctttatctattcttctgctgatttatttttcttatgcgagggttgatcttttagagcaatggctttgtttgatcgaactgatccgccaattgaattatcatcttattccattttcatatattctttcggttgtaagtcaccgattgcctggtaactttgtacctgggttcttgagcagatccattcttacaagaagagttaactagctgcacttccagcacggattttcatgtgcgtcttgcaggcaattgccagcgaatagactcccttcattcctctatctcgcgttcaaggtatgctactaattgtctatgctctttcatactcggctttatcagctataggtactaactagataagctctagtttcgtccatttacccttggtttgttatactcgaagtcacagtttagcaaatagtatatgacctgtgaaagtttgaacagaagcgagtagggactcaagatactcggacattcaatggatagcttgccttaatgcaatggggaatcaatatcagatattatctacagatcagacaagcatatgaacaaacaaaagtaaccagaataaggacaacgagcaacaggtaatatgagcggaaatgggggtataagttataaaagatatctgcgatgagcaattcaacacaacaagaagcggaacaaaaaaaaaaaaacaaaacaaacaaaatcacttctccaatttcctcttccgctcagcaagaagaacctcaatcttgcgaatctgaagagcaagacccttcttctcggcattggcaaggagccactcctccatgtcttgacgaatgtgccgcatggaatgcaagacaggcagaataggcacagaggacagaccgtcatcgactccgttctcgcgctcattatgctgccagcgctcggcaccggggttgagcaagagatcgaagacaccggcccagagttcacgatcccagtatcgtttcagagactcgcggatgcgatagttgcggaatgatgggtttccgttgttgccgtcgatagcggtggattcgatgtatttgccgaataacagcacgtggatcacgccagcaataccgtacagatcaatatggtaggtccaggggcgcatctcgcggatttcattgcactcatgcgcaccggtttcccagtccgcgatgaattgcacggctggtgagaatgcttgcatgtcgatgctgcggccgaagtcgatcagtgctaagcccttctgtcgccagccgtgagagccgcttggggagtagtggatgctttcccggggatcgaaatcggttttatcggcgtcaaggtcgagcagggaaagggccttagagggaggttcgttgggattgtggtcatctaggcggacgaggcagttgtcggctttgatgtcaccatggaggacgccgttggcgtggagtgcttcgacggtgcggaatagctcaacggagaagaacattgctaaaacctcctcaagaccgccttcagaagtatggttggagttgatggcttcattgcggacgaggtttacgaggtcgagtatggtaccctgtcctcgatagtcctccactagaaaactttcacgtcggtggacatgcaattcgtgcgcgcgaacaatgctatcggtggcgcgagaatgatcaatggattgtcgtaggcgaatataggctgtgcgaatcatataaaactcccacgcgcttgatggtccattttcgaccttgactgcttcgaaggggaatcggggagtctcataagcgttcgagtttctccgtcgggaaattttgctgctagggcttgtaccatcgtcggagtcagattcgtaggattcaagactgtcaacactttcggcgagatagacaggggcatatgcaccggctcctagctcacgtctgataatgtagcttcgttccgctcctggaaattcgaggataggcgtgtcaaatgcgccatccccaccactctttgatcgcctggtgttggttttgacgaatttctgtatcatcgaagcatagttactatcttcgacgtgaccgtgataacccgtgtaggtcgcaagtggcttttccaaggaattgaggattgtgttgcgaatacccttgtcagtcggattgcactgcacatccctgattatcggttcccgtctccggagcttaggcgcgagggccttgaaggccatgggactgaatggtacatcggctgtagacgcaatagtatgatcttcttcgtatggcgtatctgtccccactagactagaacgaaacaagttaccggccggtgatcgtggcttcgaaggcgttttcgcgttataaatgctgtttcgagcggctgtcaaagaaggaatggattccgttcgctccacgataggtgtcataaagggaaggcgattttgggccataattgcagggtcacggtaggtaccccatggaggagcataatcctcgggcatttctggaatgaatcctttcctctccggtgttccttgtgtcgagctaccttccgctccatcactaacgacagaatgtgaggtgacttcataattttcgatatctgggatatcacggtctgggttgaactccgtccaatcgctttcatcgccatcaacgctctcagctcgtgtggtgttggcatagtcggtgtcatcgtaggatttgtggaatgtttgtgtctcctcgtctccaaagtcgctcgaggccgctgatatgtgccctgtgcatgtactatctccattactagcgcagtcgtcatcttcgtaatcgctaccgcagaagctatctgcgtctgcttcagtctctgccttcaatggttgattgaagatgctatatatctcatccgtcgctgcacgagtgtgcatggtcattgtcggttcccgggtactctttcgccgcacctttttattattggtcggggagtcaaacttcattttcactgcacatatgtgagtttattctgcccaaataatgacaaaccgatagcacttacctgtttgtgtctgtgttgtttcccctttaatcttagtgcgactcgctttgggtttgcctccatggccttcatgttgataatgagaatgaccgtgactagatgtagtaagattctggcctaaatgctccggcaagtcctctggtgaatgagatttccctagcagggactcagtactgcttgcgtttccagagatctgttgcaagggttctttttgttgccgccaattcttgcccatccaaccacgcttgatagccctaagctcttcaaagctcatctcatgtgcagggttggtgcggtcagggtatacggattccaggtcgacaaatacacgttcccgtcggccggttcgggggttaatcgcttcccttacgtgatgttcgggtagttcttttggtggaattggttctttgaaaggaagatctggattggactgaatacataataaaacaccataggttcatgccagcaattagtcctgtgatcgtaaatatgtggaggtctgaagaagcaatgggtaacttggaatgggaactcacctcgtccctgaagatggccatcttttgtgttggcgctgctttcttcccaaccttcagtgtttctcctgtccatggctttggctccacttcgttctccttcttgcggtcccgaatcgatccaatgctatcccatccctttgtcgacccgccagttgcgggaccgggcgcagcagagtcagcgtccgagaaaatagccatcttaggctttccggacttggttttcgcggtaccgcccgtctgaggcgagggccgtgaagcttgtggaccagcaggggcatctgatggcgcgaacgggttcatcttggcggccagcgcgggacggacagtcggcaaagcaggcgacgagggcccggtatcttgttggcgttggtcgtatcggaattgaaactcgctgtacttgcgtgccaatctctcaactggtcgcgcctcacggtccatgccgagcttgtacacttcatcggcttgtgaccaccgaccagcaccctccagccacccggcaaattcctcatagaaaagagccagactttcaccaatttgatgacgtgcaaggaaggcaaatgtttcgcgcggggcatcggagaagagtcgaacataatgaagccataatcgtagataccgagggtcgtttctgtagtgtgatgatgagaggaacgacttcgttgcccgttccaatagggggagaagaccggattcggtggtcgcttgtgcggacggatacgcgttcagagtccatttgacataacggtcataaacatcgagcggatcgtccgattctcctatcgactgcaattcactttcgaattcttggcgcatggcatcattgatggtcctggtgccattcggcgatggcgaggggatcttgtcaccattgctgccggctgaaaatatccgggcgagttctctggctgatcggccaccggggagtgattggacgttttccttttgtgcttcgatgatatcgaaatcgaccaaatcatcagaggctgccatgttagctacgacgacagataatgtgagatcggagagatcccaaattccgtcgaagaccgaaagttcaaaagagcgagtaacaactctggcggggctgcaaggagattgattctgtggctatcgataaacatcacatgactgttacccgggtgacaggtcacgtgtcccagacaacgtctactgtatcggagcagagaatggtcaagttaggctattcaacaagctcgatctattttatgaccacatacttcatctgtattcctgtgcggtatttgtgggtcttcagagtgtgtagggtcccgtcttgatcaacgaggcttggcaacatcaacaacctcttcgggtcttcaatcagggtacccactcagctcaagaggctctacactgtgacactttcagtgctatgtgttgtcaggaatctggatcgccaaggtgcgaagactctgaatctaaggtcagccataaacggaacctcagccatggaacatctgagctctcgccacccagacgatccaaacgacagaaatccactaccaatttgaaagaactttcttctccagaagcctcggagtcagaggccgaagaatttactcctacagttaaaaacgaggttgacaacaaacctctggttgatactgccaaggagaagaaaaagaaggctccagttaagaagtccaacgaagacgccaaacccaaaaaggcgagaaagtctaagaaagaccaagaacttgagaatatgcctctggcaccgcggactaagggtctgcgtatgttcgtcggcgctcatgtcagtgctgcaaaaggtcagtgttctccgcatctcatcgtctcaattcggtaataactcaattcttatcgagcaggtgtctttaattcgatatataataccgaaaatatcgggtaagttcgagtgtcttccaattacatccaatcatgaaatagattctaatcttgcaactagaggaaatgcatttgccttgttcttgaagtcacagcgcaaatgggacaatccagctctcccggacgaccagcgcgatcaattccgtaaactttgcgcagaaaagggatatgatgcaaccaagtgaataagccccatctgattggactcgaatgggtcactaacatctacccagacacgttctgcctcatggttcataccttgtcaatctagcccaaagcgataaagtaaaatccaagcaagcatacacttccttcctggatgatctgcgccggtgcgaggcacttggaattacactttacaacttccagtgagtcaaccgcctgccaatcatatcggcgcatactgacgctctccagccccggaagtaccaatcagacacctctacccgaagcactttcccggttggcagagatgttagtccaaactatcaccgaaacgacaaccgtagttcccgtcctggaaacaatgtgcggtcacggtaacacaattggcggtgcactgtctgaattccgcgacttgctagctctgatcccgaaagagcaccattcccgcatcggcatctgtgtcgacacctgccacagctttgcagccggctacgatttgacatccccagccgggttcaaatccttcctcgccgaattcgacgagctgatcggaatcaagttcctccgagctctgcatctcaatgactcaaaggcaccgcgcggaagcaagcgcgatctgcatgctaatatcggcacgggtttcctcggtctgcgcgcatttcacaatgtcatgaacgagccgcggtttgaagggctacctatggtccttgagacgcctattgaccgtgtcccgggacagaatgtagctactggagacgatgcggctgatgggagtgagagtgagtctgggaaaaagaaactcccaaagaagggtcctaggggacctgctggtgcaggcggagctgctgttcctgatcagggtgtgtgggcgggtgagatcaaactacttgagtcgctgattggtatggacccggagggcgaagagttccgggctcttgaggcccggctttcggaggagggtcgtgcagagcgcgagaaacatcaggagcaatatgagcgtaagctcgaagcggacgagaaaaagaaggcgaagggaccaggaaaggccaagggacagaagagtcttatggacatgatgaagagtggcgctgcgaaggagtagacatatattcttttttgaacgcagagcagaggggtggcaatgcgatgaggaatacttgctgggtgtccctgtgctttctacatcatcccgaggactatataataatgaaggatataatcactacaacactctcagggtttcaaaatacaaaccgccaaaatgtagcccttataatagctgttgaaagtagaagagtcgattcaattgatggtatcagttaagccaaagccaaaatccgcacaagccccttcatgcaaatagaaataggaaattgtgttccggtcaatcaagagttcgaccaattcatatctgcgaaagtagacatagacatgcgattccaagagccactaggttctcctcgagtaggtcacagaccctccaacaacgaagagagtataggtgacataaaaaaaaacaatcacatgcatgtgcaatataggtaaatgaagataggagaggggtagttaagaatgagtgtgaaatgctagtgctgggggacattttgatcccgaattggcgaaacagacgagctcgattgcaggcccggcgacgcttggcgagcaggggcatgcaagtggggaaaccctgcctcggccattgtagtgatagtcgcaggtgctgatttaagagaaggaccatcgttttctagaataatagaagtcgatattgagagaccacgcctggcaccactggaacgtacccgggctgatgatgattggtgatcatcgttaaggtaactacccggtgcagggctaatgatcctggagtccggataggcaatttgacgataatccccgggatcgccagtgctatgctcaccttcgtcggtgtcagatgcaggactggactcgcgactccaatcatcttccgggagctcgttgcgcattcctgaaattttcatgtaattgtacgctgcaatgctgctgatagtgacgaccaaaccggtcacattgacggttgtgagcttatcgtggaagataatgcccgcggcgctgattgtgactacttccttgaagataccgcaaatactgagggtaacaaccgaggagcgctttagaagcgcgaactcggatgaaatcatgcagaatgcaagtactccagggaaaatcagaaggaacgaaccaaataggttcccatgtttgctggcgagcgcgaggtatccttggtaaatctcacgaggaccctcaatagatagcgcgatggtgatgagtgaaaggaacatgataggagtcaggagaaagagagttgagaatggattggaagtagccgggtggcgaagcagcagaatttgtgtcagaccccatcggaagcccgaaaagaacgcggaggcaatgacaagtgcgaagcccagcgcattgaaagctgtctctccagcgaccatcatcacgacacctactgtcatggtggcaatgatgatgattaattttgtcgaaggtgtttcgagacggaaaaggaaggcgaataacaggacgaaggcaagtgcagacgatttgcacatggttaaaaaagtcagagagatgaacttcaaggacatgtttccgagaccaacgtcaagcgacgttgctgcaccgcacggaacgaggcgagtgaagtagaataatctggaaacgaggggttgtggttcctcggggccatcgatgggagatgtagccgcagaccctaccggtcgtcgcggacggagcgatggaaagatccagagtattatagaggagagagagaattggacaaccatgtgtaagctcgttgtgaaaagagggaaagggaagacgacatcattctcggagaacatccatttgttgtactgcaaacatgacagttgttagtttccttcttgacttccaaatatactggaaagaaccactcactattgaaatggacagtgagaagagataccatagcaagatcagcccgccgttgattaacagcttcttgaccacatttctgtccgacagaatctcacgaatagtaccatggctcttgacgtccgcgattctagcatccaacttgcggcgctgctttcgccgtcgacgtcgctggcgtttttgatgtgttgtgagtccggtttcctcgtcatattggtcatcatccgaactcatcgggtccaactccagagtctctgcagcggataagacatcggacgcatcggtatcctcttcggcggtcagaggttcttgttcttcgcgtttgtgacttcccccgtctccatgcgaccagagtgtgtcattgcgctctgtcgaaatcggttgtgaggctcgccctgtcccggtaaccatggagcttcgccgacggtggtgggcgccgtcggagagccccattttaatgactgggacagttacgaggtataaaatgaaagagaggaatcgagatgtatctccattaacgtgggaataaagtgtgtcacacgacagtacacgagggcgaaaagcctcgggggggtaggggagtattgctgacaaagaaacaaagaggggagaatccgaagggaagaagttaatttgaaaggaagatccaagtgagagctcaaaccaaaaggaaaatagaatgaaaaggaatgaaaatgagggaaatggccaaaagtgaagtccacagggaaattcagaggaatggcaaaaatcgagaaagtgaagggcggtgatgtttctcttttcgctcttcttctcctttctcgctcctttccctcctttccttcaacaacaattcctctcattggttacactttctatatcggtctccactgcccggtcgatccggggtcaaggggggaaaaagaatatcgagatggatttggatatttcagatatttcgattatttccgatatttccgatcttgactgcttcgagtggtctgagtggtcggagagctctgagagatcttctctggtttcgattctcattagtggaccgaaacctccggccttgacttgcgagctgtgaatgaaagcccaacatccacaaacacttcacttgccgcggtggcctcggattgacatagttcgttggtgacgggaaaggctgggctttcagtctcaatatgagtctctttgagaaacggcaatcggtctctcgtcgagctcatcaagtttgtctcctatgaaaaagaagaagccctaatccacccagcatagccatgacctcagattcaaccattatcatcatcatgtcgtgtctcgggaataatatatgtcggaggatgcggatcgcaagtgacaacggggggcattgcatctacctctgctttcatcttcttcatcttcatcttattctcttccatcttctttaggttgatgctgcaaaacagcatttgatcttcatcaaaaacttcaccagtcttctgaacttgcatcagatctcttagatatttcgctcgcattgccatcatgactgaacctgcgtacaatgccattgaggactatggcctggtcggggacatgcacacctgtgccctggtcagcaaggccggtagtttggattacatgtgctggccagtctttgactctcctaccgttttctgtcgtctgctggacaaccagaaaggaggcttcttcgccgtgaagccctacaagacggtagtagatgctcacagcaagcagcggtatcttccatactcgaacctgcttgaaaccaggtggactgatgaggatggcgtcgcgacgctgctggactactttcctgtcacacctaaaaagacggcgcagtcgtcccggttgttgtcaggatactgtccttgcaatgaaccgggaaccaatcgcttcaagtcaggactgcagcactcgggcctgatcagaaagctggagtgtagccgtggctcaatggaattgaaagtggagttattccctgcttttaattatgcacgagactcgcacaatacccgtgcaaagctagaagacgacttggacaagcaccggctgcagactgtccacttcgagagtgagacagagcggctgcaactcgagatctttgccgattcacgggagccagataagcttggtttcccctcggcgtctttgaaactggaagaacgagagggcctccgtggccgcggattggtggcctggatccgtttgtcggcgggccagacccttcatctggtgttgcatagtcccgagaaggctgtccccagctcggccaccatggcagcctacctcgcgcgaatggaggaggaaacttccgactattggaccgattggacacgcaagtgtgccttccgtggtcattaccgagagacagtcgagcgcagtctcctaattctgaagctgttgacctacaaacccacgggtgcaattgtcgctgcgcccacgttctcgcttcccgaaaatgttggaggctccagaaactgggattatcgatattcctgggtccgtgacacagccttcacgctatatgtctttctcaaaatgggctacagcgaagaagcggaagcgtatgtcaacttcatcttcgagcgggttttcccgcatgcttgccaagatcaggaacccaacagcaaaaggcccttcttgccgctgatgttcactatccgaggtgagtacgacattcccgagatggaattggaccacctcgatgggtacaaaggcagcaaacctgttcgcattggcaatgctgccgttttccacacgcagctggacatctacggtgaattgttggacagtatctacctgtgtaacaagcacggaaaccccatcacctatgaccaatggaacgctatccggcgaatgattaactatgtcatcggtgttcggaaccagaaggatatgtccatttgggaatcgcgtggtcagatccaaaactttatctattcgaagattatgatgtgggtagccctggatcgtggaatccgccttgcggagaagcgtgctagcctaccatgcccggatcgctttgaatggatccgggtccgtgacgagatgtacgacgaaatcatgaccaaagggtacaacgaagagcgtggtcatttctgccagagttatgagagtcgcgaggtcttggatgcgtccatcttgattgcacccttggtattcttcgtagcgcccaatgatccgcggttcatcagcacgctgaagaagattttgcaaagccccgagaaggagggtctgtccagcgccaagatggtgttccgatatgaccacaagaaagccaacgacggtaggtatcgcttgtctattagaactctacaacaagtgctgatactcgcgtttcacaggtatgacagggggtgagggtgccttcatcatggtaaccttctggcttgtcgaagccatggctcgtgtaggttctatggaactacctaaaaaagcaacactgaactatgctaacctgaactgaatctggaaatacaggctgccaaatatgatgtggccattccaaacatctggaaactcgcacttgcgcacttcgataacatcctgtcctacgcgaatcacctgggcatgttttctgaagaagtggccatttctggtgagcagatgggcaactctccacaggccttcagccacctggcttgtattagcgctgcaatcaatctgggaagaagtggacgaatcggcgaatagagtcatctctctcagtggcaacaacgatagactaactataatactgttgtttttgaaccccaaaatttgtttgatgcaattctataattttctgcttacagatagaaaaaaaatacaactttgtgcctttttgtccaacactccgtacatatgtaggcaatgtaggcaatgtagcaaatatagatcatcggcctaggccagcctggaggtgaagacaaatgcttacataatggactagatgatcacacgggagctccagggccggtggctaccccagattctctttgttcatcatctttgactgtctttgttcaagacaaacatatccaaacaaaggaactgctagggtgctgttatcttcagcttctagctggagatgttcttcgccaccgaccctttgtgccttattacctccgtgagcgcgtacagggatccccacctgtctaatggcaggcgccagcttggattgggctgataagcctaacgccgattttgccttgtcatcggatgaagaggaatttgtttccagcccaagcactgcttcaagggagcttgaaggccctgccaagcaaaatttgacgctggctttggggaagttgcacttggagcaagaggacttgaatcaatcctctggacaggactcgactccaacaacaccccacatggaaggcctaattcaaacccccccagaacttgaaatggccaaaaagcctctgcagctactggacttacctttggatattttaaaggagattatcaaagaggtaacactggtcttccccgcagatcatgaatagatagcttacagttctggtgtaccataggtgacccatacgactgatctgacctcgctcgctcttacatgctcctctcttcatttcttagccattccgcacatgtactcccgtttcgacatcgtctggcccgagtcgctgaacccatcaacggatgactactcgggggtggacgctctgtcttatggtttgtccacattggtcatgggcgaggatgtatttaatcagccggcgctgtttcaatctgacaaggtcaaaaatagctgcgtgaattgcggttgcaataagcctcatcctcagcccgacccggaccctggggacaacggagatcgcctccggtcgcgacgaggcaatcattatgcacagtatacccgcacattctctattggaaatggcccgctcagttgggtacaagaatactcggtgaccaaagaagtgggcaagatgctagggacgctagtcgctttagcagttgcacggatggtgaatctcgaagccttcgtttgggacatgccgactggagtggtacgtgaaatttggctcgcgcttgcgtcgttggcagatagaccaggacacgattgtcgcctggagcgcatttgggtgcgctggcatgacaattcggagaatgctctacgcagttcatcggcggcggcaacgaggctctttcagaaatacaaacacgtggaacatccctccttgtcagtactacctccactcaagaatgtgactgttcttgacatagatgaacccgcttatgtggaagaactggcaattctcattgagcggtcacgtttccgtctgtccgaactccgcattggtattgccgaaaaggcccatatgagtccgtggctgttgtgtgggaaggactctgatggctcaacgaattggcctagagctgatggtgtacttggcatcttatcgcggcggcaccttgacaaaaaacaggataatgctatagtttcctcccttgaagataaatcgatgccctctgacgaatcgataaacaagtcactaaaatctaccgaaattgcggctccattgactccaaatagcgaggagcagcctcccagcaccaccaaggacaagaagtccccaccaagctctggtttgtccaaccggagcgcccgctcacagccacctccctacaaatccgactatgagatacttcatctcaaagtactcgagctagaacgcgtacctctttctgtgccaaccctactgccagccgttgactggactggattgactactctcactatcatgcgatgcgatgatcatgaaaagctctggagggctctccgtcggaagtatgctcctcctgcgacgccggcaaaacgcccacatgatgcagagcgtcgaacaaacgccagctcagttgaatatccactaaatttgaaacatattcgcacggacactgtttcgccttatcttatactgttcatcaaagatgcgctggctccgaataccctggagagtgtgtatttgcatgaagccccaggtcatgaatctgctgtgcatatcgacgctatttacaagcacattctgcgaaagcacaggcggagtctgcgaaaggtgttgattgacgccactgaccgtataatcggcgctggatattcaggcatacgatggcacaagtggatgttcacccacgatatggtatcatttgtcacaagtggaaagatgccgcagctgaaagagctgggaatagcgatgcattatcgcgattgggtaagaaaacgatcaccagcattggatactttgatcacacctgggggcttgtgcttgtgctaatgatgattctgcagcatttcttcctccagagattgccaaacatgccccagcttcatgctttgtatctaccacacattcatcatagtgtccatcgggacttgaaagagcttgcgctgcaagtcttggacatcgtcagcatacgtccagatttgaagatcgcctacattggtctccacatcaaatgctaccaaatccttgaagcaagacatgacgataacccactagatttcgacgacaaccccgcgattgaacattccccggagcttagtgaagatgaggatgaagggtgggccaaccccaatcacgattctgaaggagacagcgatgattccgacgatgcctcgggggcagctgacacagacctcctttccagtgacccggacgactacgacactgaacctgacgaagaacagggtgattcgcggattcgttaccggctacaggagattctattctacgacgagaaggtatcaattttcaaggcgcgtcatggtgttttatgatctcatcttggcttgcattctatatcaggagttgtccggaccatttgcggcgtttaaaggggtacagagagtttgcacctacgaacaggagataccatggctttttagcttagcactaaggttatttgttaacctcggaatgacacgttattttgagttaaggttgtgctgagtgggccactctaagtgggtcaaagtggtacatagcggattccaataaatcgggtgtagtacatcgtcaaattagaaatacactttgctaagttcgtttcgctgggactttcgctcttggttcgtgatagcgtttcttcgtgcaaaaaatcctccatcgcgaaaagaatggtaagtcacatgacatggactgaattatcttggcttctcaatattgacgcttgtacttttctcttaggagagagctaaacaagtgtggctcctcggggaatcatatcaacttagcgaattggatggccttgtgccggccatagttcattcaaatttctgccctatcaactttcgatggtaggatggtggcttaccatggtggcaacgagcaactggaaattaattccggacagggagcccgagaaacgctgcaactacattggcgctgttcacttcctagcaacacggccagctatgaccggtctcgaaaatgttgtcacatttcgatgatttcgaggcggacagacccccacatatcagaacattttggcagtctcgcaacagtcgttaccgaagtacttcatcaacataggatcagaggttcccccggacttttcagctttcgcggatgtcggctcgggtcttcgccacgctgggcaagtaccgggttgataatcaattatttgctcactcatgcaagtcataatatcgtagaatttccttatttatgctaaggtaaaaccatgggtatctgagagagagcgctagtgttcaattgttatatacatggcgggacagattcgttcatgcaaactcccggtgtgcgttctcatactgggcacgaatcagctcgttctcgatcacacgtctcttagccttttcttcttcgctagaattgtctttgaacacatggtccatctgctcgagggttcggcccttggtttctggcacaaagaagtaagtccacattccggcgagtaagcaaaagacggcgaagaagatgtaagcaccgtagccggtgtcttggacgagaggcggggtgatgagaccctacagagataatcagtatgcttgacacaccgagcgaccgaataatggtagcgagaaacttacaatgatgaagttgttgagccagttggagcaagttgaaagcgcaacgcccttagcacgaagggaagaagggaagatttctagaactgtcagattgatgcttgtctaacaccataagagaataaagatacgtaccggaaggcagtgcccacgggataggaccccaggaagctccgaaggcaagcatataaaagagtaggaaggccacactggtccacccttctgctttgtgggacggccaatcatccgagtaaattccaaccaacgcagcaataacaatgtgtgatatggccatcagggctgcgccacctagaagcaacttgcgacgaccgacgacgtccatagtccagatactggtagtgacacccaccaactgtacaacgttgagaacgccggacatgataagttgcatgcttgtgtcgagacccatcgtggcaaagagagttggggagtagtaaataagagcgttgataccgatgaactatccatatgattagcatgtgtcggttatctccacgtacatagaactcacctgttggaagaatccgagtccgacaccgatgtgggtacgacgccagcagccctttttgaagcaatcggcccacgacgaaatctcctgcagaatggagttctttgtgccaccaccttgtaactctggatgcttttcccggttcatttgctggtggaagcgcacttcggcctggatatccataagctcctgacgaacgcgtctgtcggaaggtggcaggcaacgaagtctgcacagactgtcgagagcttcctcatcgcgaccctttgaagctagccagcgaggcgagaacggaagagcgtatacaccggcagcgaggataaagcccgggatcatttggagcaggaaaggaagacgccaggcccattcaccgtccatgtatcgtgtggcataggtaatccaaaaggcaatgacaattccgaggacgatacaccattcttccataaccaagagggtaccacgacattcggggggacctaataggagagaccggaataagtattcatgtcatatgtgtgtgaggaaggggaaaaaaaagaaatcacatactgatttcggagatgtacaatggtgcaaccatcgacaacattccgattccgaggccacctatcagccgggccaccgtcaacatgggataactgatggcagcagtctgaaggacagagccaacagtaaagatagcaacagcgacgagaatcgaataccgccgcgagatcttatccgcaatccagccctgattgagagcaccaatcaaagcgcccagctcaatcatggccgtcaacaatcccttcgcaaatcccgagcccgggttatgctcatctatccgcgggaattccgtcaggaactggtccatgaccagaatcaccgacacaacaccttgatcataaccaaaaagtaaaccacctagcgttgagcaggcggcacacaagaccacgaatgggctggcaaccagaccgcgcagaccgggtgggccatagggctcgcggtctgagttaatgtcgtcggcatggtgagagaagccctctaccactggttcatcggatagatctttcttaggaatatcatcagtcattttgaatggaaactggaagaaacttgaagaaacttgaaggttatgtttctttgaagcggaagaacgctctgctattcaaactctacccggaggcattccggcgatatttatacccatttcccccaataacctaaccggggtagtgtacaaggtcggttccctccgtatatcgggacctataggaagtctgggggggtccccggtccaaaaggccaatgagacaaaggcgtgataaccaagttggggtagatgacggagtgctagacggttcggccagcgggtttggggaagatcggcgctataggattgtggggaaaacacggagaagagaaataatagcacgtcgtcaattggtggcggctattggcatggtacaaggacgcttgtcttcctctgagcctatactcggcctttgacagatagacttctctcagccccagaaccattcttgggcttggccagaccgagacatcttgcatacggaatcggcatagaccaaggagtcatagggcatactccgtacagccgatttgctctaggtcctgttctattagattgataagcttatacagtctttcgtattcgtgtctataggtatagctagttcatacacactcgggcattcaaccaaagatcgccatcacctatcacatggaatgttctggacaataccagcatcgaaggtataccgtataaccgagccctaacaccctcgggccggacatcactcggaaagtcaagtgacttgtgagccgatcttatcccgtgatggtagttagtgtcgtgtgagacagtaagacataggcatgataggatcctttggatgaatcgcgacactaggtataatagtagaatccctgtgataccttgtcaatatcaaaccagataccccacggggaaaaaaagaggagaacaggctttccaacatctacaatctagctctttttgatagaaaatcggaattcgttgtccactttccaacctgagcggtgtccattgcggtaaccattttcccccctgcggattccagttcccgacttctcccccgccactcccaacctgcaaccttcggacttcccacttcactttgaaatcatggcttccttcatggaagacctgtggtcgagcatctttaccccaggacccactccaacccttttgattgcgaccaacgtcactttcgccgcactccagcttatcttccttgtcctcctcttagccacctacagcctccatttcgtcgccctgtccatcatcagcggtggactatggtggtccatcaactggttcgctgccgaggttcgactggcccagcaggcgcaggaagcggagaaagaaaaacaagggtcggagggtgacgcgaaaacgcggaagagtcccgctgtaagagaaagcgccgacagcgaaactgaaaccgaagtccttgtcgctaggaagacagacgataagtctgctcctgtcgcgactgggagtgcaacgtccgggttgatgcccacggcgcgcgatcctaagaagcggctcagcactggggatgggtcgggctatgggagcactgatagcgagtgggagaaggttgatgatactcaatcttgagtgatatgtggtactcaaggatacacacttgcttcgggatatttacactcgcctcggtggaacactgttgcacactgcacgctcacccaggccccggacatctcgacgaatacgtaggacgcgttcatggtgatacaatccagtgtcgaccttccgtgtaccttggctgggatttggatttgattttggatttgattatggatttggattcgtatatacgcaatgccctcttgtctgtttgtttcggagcgataccccatactatgtagatggtgcaatttacagcagctcgtgcttggttttgattttgctaggagcgtgatatccttcttctctctgaacacattcattaacaataacattcaaaacatcccatccactcgtacttcatacaaaacaaagtaaacagaaccggtggagctgaatctttagaaagcatccacgtgaccttcccccagccaaacaatgaaatccgtcgcaacataacataggcaaccatcaccatcgaacacgatcgcagcagcaaccagacacactagctgcatcccaccatgtccgatgtcccttgatcaaaatgctctccaccgtacccctcaatgtgggacgtaggcgcgtctgcggctccgtcttctcccccgcggctctcgaagctcatccgtcgaacacgaccgcggattcccaacgcgaacagacaccagtcgcatccttccgagaatcaaccgattcctcgtcaaccttcaaaacagactcgcaatcaacctcattcgcgacgattgggggattgacggacgctgcatccccagaggaagacacattaaaccaggcgcggcagacggtaaaagagtttctatctgtgcccaacctgggctttgaattgctttacagcttccggaataccgatggaagtcaggcgttgaaagaatggaaccggctcagccctccgtcgaaggagacgaccgaggctttggagtatcttatgcgaacctctccatggacattgttcgaatggtacgggaatgatattcgaaggcattttctagtcaatttccggactggcctgtctaaggtatggacgttatatgtcgttttgaattcaattggtctgtctgtgctaacggtcttatagatgttaaattccacgggggaagaagacctgctccgaacaatcgtggactgcttacagcttgcgcgtcaaatttatctcgctcccgtcgtgcactatctacttccgttaatagctactcaccaccaaggaggagggcaattggctcaactacagcgtgcctttcatacagtagttcaatacagcctaccatggaagaagatttcaccgcttctggccagagagcttacgcgagatgccgcggttatcttaggcatcgatgccctggacgaagattccgatgcggacagaatgagtctcgatggaacggagatggaaagagcatactctgtctcgtacaaagagtggaggcaagaatcacccgaagcccaactacacatgatggtcgagggtgaagatgactgtgtgacctttacacgggatcggctcttggcgtttctcgacggcttgcagcttgtcggacttggtggtgaccaggcccagaaggtgttcgccaatgtgatgaacatcatgatgggagacttcattcgtgctgcatatgccggcgaatggcagtcgccttcaactgcgccacagcacttggagcaatgggttgaaaatgtctatgcacggctcgctgcgcaggttctagccatcatccattctgatcccgctggaacccaatccggggccatggaagtgagcttgagggacgtggagaagtggcgagcaatgggtatcgctcggctgggcaagcttcgagtcagcgagcttttcgacgtggttgttgattggcccgtaagcggcggggcggtggaggatctgcgacgcttcacaaacaactcgtctggagcacgcatgtatgtgacgcatttcttttctattaacttgctccagcgtttgttgcatcccggtgcttctacagtcgagattttgcaggtttacatctcaatcattcgagcattccatattttggaccccaagggtgttctactagatcgcatcgctcgaccgatccggcggtacttgagagaccgcgatgacaccgtcaaggtgattgttagtggtctattggcggaccccgcgacagccgacggaccgacagctaccggcgacaacttggcagaactggcggcagagctaagcaaggtccaccagcattctatgcaaaacaacaggagcgagctagactatgacgatttatactggttgcccgatccagttgatgccgctcccgactacaggaaatcgaagagtgcagatgtcattgacagtcttgttagcttattcgactccaaggagacctttgtgaaggaaatgcagactctcctcgcagaccgcctcatccaaaaacgccagaactacgaccaagaaattacagtactagagctcctgaagatccgattcggcgattcggcactacaggcatgcgaggtgatgctgaaagatatttccgactcgcggcgtctcgacctcaccgtgcggaatgaccagatattgtctggatatcgtaagcaagcaggtgtcggaaaactccacgccaaggttctgtcacgcttcttctggccggagttccaagagcaagaattcaaggtccccgacgaaatcaccaaactgcaagagcggtacgcgacctgcttcgaaaagcgcaaggattcgcgcaagctcaaatggcgcaacggcctgggtcaggtcaccgtcgagctagagctagagaaccacactttcacagacgaagtgacaacctggcaagcaaccgtaatctatgccttccagtctgactcgagcgaacccgccacaagaacaattccggaactcgccgaggagctcgaaatgacagttcccctagtacgcagtgcctgtctcttctgggttagcaagcgcattctcactgaagtacaccgcgacaccttccgcgtgttggaaatcctccccacggaagacgaggaacaccatgcgcacggaacgggcgactatagcgacggctcagacagcgaagcaggcgacacggccaatgcagcggcagccgccgaagcagcagccgccgccgcagcgaaggaatccaccgaggcagctgccatggagaaaatgaatgtgcattggcagtttatcgtaggcatgctcacgaatcaagggcctatggctctgaatcgtattgtcatgatgctgaagatagctgttcctggcgggttcccgttcagcaacgaggagttgcgcgagtttttgagtggtatggtttcgaagggcaaattggagattgtaaacggggggaattataagatcgttcattaacatgggcaacggggcgtcgcatgcgagcttttttatctttggcgttgctggaaccgatgtacggaatacccattaaagaatacatgtatgatttacgagtgatagattacctcaattaggtagatccaagccgtggagtatctagtctttctctaacgcgcccctttttcttgtctacatgcaacatgttagtgaagttactgttctggcatgagatatatatagacgagccccaccacctccccgcctacacaaaccccaccaaagcccaatcccaaacatctcagagaaggaagaaaaagaagaaaaaggtatcatttcaaatctataagccacgacctaaccaaagcgagcatcattccgcatccaaaagcgcaacaggaacctgattatcaacctggatgccaccgcgcttcttctcatcactatcccagaagggcaacttccagccaccctcactctcaggcgtcgccagccaaagacgcataaggtggcggcggggggcaggaggcgcgtgatcggtgtactcagtgcgggcatgcaggacgtgcgcattcgacaagaactgaatatcaccaatatcgagaatcatgtgcagcgacaggcgcacgcaggttgcttccagcacgcgcagggcttcttgctgagcttctgacagcggggggatgattcctgcgtcgctgaagcgggtgagggagcggacgtagtacgggtcccatctgtttctattgttagatgctgaaatattgatatgggatatgggtggggggagaacttactttgtgtagacacggccgttctcgccgggctcgaggtacaccacgctggtgcgaatgtactcgtcctgtcccttgcttgtctcgcccttgcggtcgaagtaccagattggctctgtgagggtcttgagaacgtctgggcgttctgcggcgagggtgttgtagacggagtgggaggagacgaggtctgattcgccgccctcgagggccttggcgatgcagaggagaccgacgatgtcgcagtcgtcagcgtggaagtattggctagttagggattagttgattgttcgtttcttgttgcgcattcactagagaaactcaccgagcattggtgcggtagatgcgcactttgtcgatctgggtggagtcctcgccgagatccttgacgtggccaaggacgtggccgcggctgttctggctaacgaagtagccgagatatgtgccgagacccatgtatgccacggcggacttgtggttgccccatttctggacagggaagcccttgaagaggatgaagcccttgccgtcgatgaggtctgcgcgcaggtcgtgcaggtaggcggcgagagtggggagttcgaagttggtctattgaagtatgattagttctgggtttctagtttcctagatgtgaattgttctcacctttgagattccggtcagcggggtcttggatgcgatgaaagcatccgatgccttgctcagctcatcgatctgggcctcggtgaagacatgtgtccatttttctgggtgctcgcggtattcctcagccttccacactgttgggccggtgatttctttagggaacttttcgaaggggacgagctggtcgtatagcgggggatgttggccagtggtcttcaatccatctgggaacaaatcccacgagatgggccccttgagatcatgaggggcagttgggagaggggagatagcagcgggagccattatgaatgatttttagagaggaggtatgttgtacagatgaagcactaaatgaagggccattggtttttatttatattctgtcacttctattgtcgacggtgagcaatgtagtggattatatggcgtgacgagatcagataattgctcttgtataacaaaacgagtgcggccaccaaagaagtgaagctgattgggggtggaagagccgatatggcgcaatttgcggggtaggatgttgtgatggcagtgggggatcacgaatttggcttcaagatattttcgagataggtttattgacgagaatgggaagatagacaggatgtagaaagacttgaatgtgcgaaattactagttgtgaagtcgcgatatagtacttgacgttgaaacaaggtcacggtacctggggagtctaggatctacttattcaccaccatagtacatattcgatatacatgcacatctctgacatccacttgcgcagccagtcagagtctcggccgatagactaggccgctagactaagcttatccattgtcttctagcacaacatattctgaccacagccgatcgtaccgacaatcgtgcatgcgccgggtggtcgggttgttcccagagaggaagtgctctagacagatctattatccttgtagctcatgcaatgcatgcagagaatctatcgggcgagaggtttgagttctaccgttttaccttaaatatagttggtcttagggcttcggagagcacatggtaatccgttccttgattttaactcgcaaggttcgaatgttgcaattgataaagcacgctgtgcccctgaatatatctcgaaattctttcattcttatatacatctagccttcgaactttgcatatggtgcttgctctcgtgcttcttgatttgatacctatcaatggtctttggatacacgatttcatcttttgccttctttcctttttgcgatattctcccagctttccatttccgaataaacaatgactttgatctcttttgatgtcagtcttgctattcttcatcagctttctgcagacaaggattggctttcctatttgggatgccccaccagattactcaaatccttatcgggcgtggggacacgaacgccctttgatatcgaagttttcatttttgtgtatttgtagagttatacattcctttcgtttagcacatacctccatttgaatagatacccaagcccatggcccaacgcatgattcacgtggccgcgctagacgccgacattccatgcctctcagtatacaaagcgcggggtctatatagctcgcacttccgcgtccttctgcaagcagctgccgaacgcctgaataagaacccagaaaccctccggaacggacctctcgccatccatataaccgccttcgatgccgtaggcgggtctctgcctcctctggaaaccctacgaaccaaacctcagtcgccagccgagcttcacgccggaccactgagtccaatagacgcaatcttaatcacgggctcagcagcctcggcttatgaagaccagccctggatccatgcaatgcaatccttcatccgaacagtgcacacccactaccccaacataaagctcttcggctcctgtttcgggcaccagataattgcgcaagccctcctcagcaatatcgccaaccccatccactcaccaatatcaacattccacgtcgagcactccccagccggcttcgaaatgggcatccagcccatcaccctccagccctcctttaccgcgcacttcccgcctctcgcacgcgccacagctcagcacccattccgcatccagctgattcacggcgacgcggtggtgccgacacccgaggccgaagctgccgcggacgatgcgggagtcgcgctgccggaaccgtggtccagtatcgggaatagtgcgcagtgcgctatccagggtctttataaccccgggcgagtcctgacgtaccaggggcactttgaattagatacttttgccactggggaacttgcgcaggagtttggacgtcgtgcggggtggtcggcggctgttgtgggagggtatctggagcagatttatcgttcgcgcattcctgggtttgaggatgatgatgattctaaggctgctgctgaggcggttttgttgttctttgctggggaggatgtggattctatgtgtggtattgatactgggatgattacgcctccgctggattgattgccttttttacggtcgggtagacatgaagagtaatggtatttggcgttattagctatatatttctatcagttgttgggtattgtgtccgagctggtttcgtttcggcgtttcggcgggcgagtttgttcagggtaatcccttgaaggcaaaccgtgcgccaagggtttcagatgatactgagcataggacacgaataggagttacgagttacaataatagttcgtcagctctcagccccttagtgacgacatactaggttaccgtgatcgtgttggaccctgcatggctgacacgcagctggtatgctggtctgcaggaagggattaatgcggtctgaacaaggctggaaatcgaattacgcgatacaatggtcatagttcttagatccgagatctcggatggaattaagggtagtacaatggaatataacaataagctgcatgaagctaaaggcgccttacatgaaatctaggcgataccgataagttacattgtccagaacaaagtcgcccgaagtcgactcgcaagctctccactttgtcattttaagtggagcgtgacatgcttgacatttctagtgtatggatagatagtgcagtctgataacagccttattacattattcttccgtatgctcaatatggttactactactattagtattcgatattgctcatacaatgtacctcgtacggcataccaaaacctcgaactggaaatctcagacttttctgttgatcccctgcacggccacccagaaccgggatggcgtgggagttgcaccaatgagaatgaaggtaattggagagtcggtggggactgggggccaatcatgctgcttttggatgctcttcatcggcattttgttatacagggtattggtaaggtactggtattggtgtttggtatttggtatttaggcaggtaatctagaaagctatgcctctagagttaagaataaatgggggtcagagctgacagatacttggaagatctgggaatcggatactcgagagagatatacaatatagtgaatggctacatgtacctaggtatgtattcaagcatactcatatttcaggtagggcataagaagtcacgcgctctaccccttccattgctctatcgcatgatgttccccaatattggtcgaccaagtataaaattagaaataacataatacaaccatggaaatctccaataataccatacgtaacattacgctgtaacgtggcgctagttcgccacccggagcttccctcccttctggaatgaagctcaggagctggggagagcttcagaggggccgctgatagcgcctatcgcgacatatttcggtttctttccttttgcccgggttgcgcattagaacagcgctagatatgtgtttattttatgaatagtccgaataaaaaaatcgacattcatagatgtcacataaccaaatttataaattcaatgatattcgctaagagcttcggtgttccaccggggtttccgacgaaccgtgctaatcggttgtatttaaataccagttctgtacgataccgtatcctttttttttttctttcatttttcactccttttccttgttaatttcctcgttaatttccttttcatttcctttcatttcctttgtatatcgttgaattccactttaacaagtaaataagctaaattccaagaatgggggttttctttaccagggaagctcaaagctgcacgcccctcttttggttatcgatactcgataggcacgatagccaggtattcgagctcacaactacagaactataccaccagaagtagagagggaagctattccggacgagaattaatagcagaattggaatccaacgacagatcccaaatattcacccaatcgaagaagcacggagtaaaaaatagaataaggcgaactctgcgtaattacccgtaatacccccagtgactctcccacaactagccctcgaagtactctctgaatgtactccgtatgagccgccctctcgtccttttccttttttttacccttttccaattcttcccttcttcttctctacacacagagcatgttgaactgcatttccctttcttgttcatatcaaccctgtctgtgcttggctgccctctttattcgcccctcctttttttatctcaactcccgggatctcggatgatcatatgcaccatgcctcctcgaagctcactgaccagctcgttctcggtaaccgatgccaataatgaggtggtctgtcccttgaagaacaatgatagttccaattgtcgcaagcgatgtctcggtgtgagtactcgcccccaagccccacctatcaccggcgtgcgagagctatacccgtgcaactcgggagttccaacttgaactaatccggttggtgctctaggaaaaacgctatcgctccatgcaggagcacattcgacgtgcgcacccgaaccactacatcccgaagctcccggctaccgaggagagcttcctgatgatggtgaacaccccgctcgagcaacgggtgcagctgtcacctcccgaacccgctcaacctcgtcgacctcatggtcagtttttgttttttgttttttttgtgtcttgattgccttgcttggtcgctacacgtactgacggctatgcacagatgtggcgccggaaagagacatctatgtggcggacggctccccgcctacccctcgagctctggatgaaccccacccagctgcggccacggcggcggtggctttggcacaactgcatcaccatagactggcctcggattgggatacagacatggtttgtcgctccgggctgttgtgggcttcgacccctgagtctctccacagtggcactgacctgcatttccccaggatacccattcggataccgacttgagtcatcctcgcatgcgcggggctattgaacttcccccactccgcgaccatttcaagcaggaatcccttccgccgtttacgcctcgtccgcgcgagcttctcccgtccatcctcaatcactccccgcctggtcgctcatccacattaccgccgatccagcggagagacaaattttgccgcccgcgcaaatcttccatcacccaatcggcccggaaacctaagcaggatcgccccaagtcaaaggaattcggccggcgaccaagcctcggtgaccgcaaagccctttcggcagagccgcaaaccgcggcctgggcgcaaggcaagcgctgggaggacttgattgaagcggcgacgtcggcaaccgaagtagacgatgagccatattcagaggtgagttttgatgcaattctggaaaattttctgggtactgatgcgccagttcaggctggtcggtctccaacgattgccccactactttccagcgtgacttctgccccctctggggtgaaaaatcggtcctcgctaccacccgctttccaatccacaggattgcctccgatctcttcacataggccattcccaccgcattcatacgccgcctcgcctttgcacaaatcattgaccccaccaccatacgagaatcaccgcagccgtgagagcgacttggaaccattcccatctattgaatcatcgctcgattccatgtcttcagcatcgggtagaaattttgcatcatcggtttcgggagtcgcgccgtccataaactctgattctagcccagttatgaatcttatcccgtccttgtcccagcgccaacatcaccgattttccaaccctactccggcgtctttccgcaacaaggaggttcaggtgttttgcgctcagtgcaaacgaccctcggcactgaatgagtgctatgcttgtacggagtgcatatgtggcgtttgccgcgactgcgtgggcatgttcatttcaagtccgcccgcttcattccgaaccccggggaatggaccattaaataatgcctcacaaggaccgacaagctaccctggtcctcgtgggtgtcctcgctgtcgaacggtgggaggcaaatggaaggctttccaaatcgacatcaagtgaacgacttcattaagacagcctacatttttggcattacgcattttacgactgatgtttggtacacgttcattcttatattgttatttattcttcattccatcggcatttccggttttctgggtttcttttttttttttttttttttttcactgatctggcaggatctatcatccagacgatgttgcaggagttgcttttctttttcaggccaggtcttttcggcgcaggtttccgacagtcaacaaaatcccgaagaagctggtcttcgacattcaattttctacgttctcttttttcgcattctggtggacaaatctttggtcatgaagtatatgctttgatgctttttcaagtctttcatgtgatgcaaacttgtactgcaatgatttcattttctgtttatagaagagagctgtggccatgggagacaggcgtgtcctcccacatccaattcttgatttatataaccaatctactcatcccagatgacactgctaagaccctccgcagttcccacctttccaggctcgccaacctgtagagaagcaatctcctcacccaaattccctgtcctcggatcccggcgcacaatcgcgaccgtcgcagaagcttgatttccaacggcaaccaggtctccagcacgattgatcacaaatgtccgcggcaccttgccaaatgcagaagatgagtcccgcaattcaaccgacccatctacaggagaccgatcaagcacaaccattgaatcactcggcgcgaacccctgatcactccgaatcgaaacataaagcgcattcccgattctactaatcccagccggcgtcgcaccctccggcataacacccccgggatacagcaccagtgtctgcgtctgttcaaaagacaaacacccagacctcgaatacgaaacgtcaaacaccatcatcgtacccccgatctcgttaacaagatagaacatcgtctcgccgacagcggctatcttccgcgaatgcgtcgacccaacctcagaccggccggtgccatctgtccaaaacacgccgtgtctcggcccgctgccgtaggtaatgttcacgctcggacactctgacagctttccggacgggccatcctcgatcgcatacacgcgcagtagatccgcgccgagatccggactgacgatgaacgagccggtcgggtcgaggatgacttcgtgcgggtgcggcgagtcctgctggtcgaatttgcccggtcttgtgaggttgaaatggaaggcttgcaggcttgattggttttgtttaataggtagggcgaaggttgagatagctgagccttcgctattagattgttagtataggtccacaccacatccacagcaacacaatcctaggcaaccaagactgggcatgtaggtaaggaagaaatacatactaatgcgcaattgcaataaacttcttccccgcatccgactcataaataacactattgacgccaccaccgacagtcttcgcgaccgcgccttgacgcagcgtgccgtctggtttgacatgcagggccgtcaacgtgccattcgtggaaggatcggcagttccgctctcatcggagcagtagacggtacgggtctgcgcgtctagggttaaccagctcggcatgtcgccgcaggtcttgagtgtttgtgatatggagaggtcattgttcttcagggctagggtgtagacgttcccattgtaatgggttgcccacaggtgggctggtttggaggtaataatggcggctgaggttattcccaaggcggagaggatgggtaggaggttttggaggtgcatttcagggctttggtagatgctgctacctgaaatctggtgtgatggattgatctattggtagggagtactagtatatgtagtgatgcaaagctgattggggtgggggattgggcagacgcggtaggggatcggcagtccctggctgtctaggaatggacgaggggaagaaaggggtacgagagtttttagggaccatcatgacaaagggtttttttgccaaaggggtgacattattattgtgtttatgttgtgttgctttagtctgtttccacaatgctgtatcgtgcatattaactatcacaatggctaaatgaattagggttaatcccccacattgtgataaagccacgagacagccacttcgtcacggttacatgctagctttcatcccatgttacgtgggggtctcttcgtgactgcgagggtggatcgataacctattcttcaatatatatgtttcgctaagagtcaattcagtgtcaaatcaatgtcaaaccagtgaagcaaacagcattgcacacaagctcggttccaacgacaccgagtacaagctaccacccaggttagccacatacacaatggtgttcgccttgtccaacttcaagccaataggctcgtggaaatgacgaattgccggtcctaaatgttgggcatactcgacaagagtaccagaaatttgtcatatcgtgccccaccatgacccctaggtgactttagactatctcgaaaagaagctagcaaatcccgctttattcagattcccacatgggagcaagctgggctgtttaccttcaattacaaacatatacacaacacgattcgtctttacagatcttgccataccaagtttgacatatcacttggccccggatacgtctttgtccctacacatatacatccaatgttttatagcgaatatcaattcagttgcaaaccctatctctggtgttggatatgtggcttagatggtaattggtcgtgggataaagatagtattgaagttgttcaccaaatttgacactatgaaaattgcacttgaaaaaggcgtccattgcaaccactatcttcctgcttatcattctcctcaacgctaaccatatgcatttccagctattcttattcttctccaggcataaccggacgtcttcgctttacctcatccaacaggtacagctgcagttgataatcttcatcagctgtgctagaaagtccacgtttgagataggaaaaatccattgcattttgattgccgagcgcatcgagcctttgaatttcagattcggtgtatcctttctggcgcagctttgcaaagttgtaccgctgtgtattttcaaggatagtgagcaagttgtgaaggcagcgtcattctagcccaagtcgcggagcccatcttgcatcttctttcgagggggagtcagagtagaaaggtaattggtgatgacctctgcaggtggctctctgggtattgtattatcagtgattgcgatagcatttcggttgagctcctcttcggacaggagtttgagaattttcccagtatcatcaagtatccacagtcctttggggggtggaacaaattcaggttgttcgtctgccgtgatcgaagactgaatgatggaagataacgcagagatcaaggcctggagttgtgttcttaactctacctatgtgcatatgtggacttctgtcacacaaggaccaactcaggattcaatagatgcgtcagaatgcgtttatataaggtttgcggcccaactaggtatttttgtgcaggacgtgtagggagtatatagttctaaggttcctactgatggtttcatcttaggttaagctagcgtccgaaatacggtattaaaaactgaacatgaattgattttctccatggccaaacagattagcagataagattctcaccctattcttaccctgcctattctttttgcacttaaagtcttttcaaaccctaattactttgctctatatacctctcccacagtcagtcagatacatacgaccatagggtgtggaaaacagggcttcccgtccgctcagccgtacttnnnnnnnnnnnnnnnnnnnnnnnnnnnnnnnnnnnnnnnnnnnnnnnnnnnnnnnnnnnnnnnnnnnnnnnnnnnnnnnnnnnnnnnnnnnnnnnnnnnnnnnnncgccggtgagttagtagttgggtgggtgaccaccagcgaatcctcactgttgtatgtttttgtttttatttgttcagtatagcaataatagtatgttcatcttaggccccattgtagaagtctataatgactttttagaaattaagctgaacgagacataagcacttgacgtatctatctgacgctatgaccacagcgcggtaacgatgagatataagttgctttaccaaccacggctatagttcagaattctcacccttgaggtgataggggccaactcactctaaaccttgtcagtcctagaaaaatataaatagtcaaaccccgaggcgcttctcttactctgccatgtttttctttgaatttctttgccaactcaactaaaatatgttctccgaaaagaatatcccgaaagcactctaagagcgtctcgcacgtgctatatcacgtggctttacacgtgaatatctgagattttgtaaggatcgcatggtttctattggataattgtcaaagtgcaaggttgaatacatggattttacatggtattataccatatagatcacatgacttcgagtactcggcataaccatggatatattacgtttagtcatcattaccgctcagattgttgaaatagccgtcttaccgcccctatacctgtaccaggaaagacgagagagaaacgacgagagagaagagtgaagggagaaaagacgagacactagggacgtgtggagcacttaagtcgttgttctgtctttctttctcttttcctcctttctgtctttagatctttatacgattttctatcttctcttcctttcttctttcacttaaactatctctaaggttatgtttgaaacttcaaggaacaaaacaaaataaatataggtcttctacggcgatgaatctgagtaaagccataaatgcactctgcgctaccagggataagatttaacatccgcagtttcatcaactgatgtatgaggacgataggaataattgaatcttgtacgttcttctattgttgttgaatgcttcttaggttgaatagatattgtactagatagttctttagacctatttgattcaagggataggctgttcagttactaggataatacttttatgccctttcgtatagagaggaagatgaagccgtttgaagtgttattatagcctagagaaagaggattaggtagcctgataaaggagttgcggaaggactaggatatataggtaggtatattgtgctatttcttatgctgtactgcttattggctgacctggtcaaaggtttcgtttattattattacgagaatgtaagtaacgcggattgtccggtatatatggttacaacggactctagaacgttatagtctattagactagacaatgactctatggtatacttgttcaattagtcttacttgattgaagagttataatccaataccttctagtcggtcactgtaatgctagattctcgactggatccagaaaatgcattcagtttaattggtttctgtcttaaaagaagcaattatcgccctatcgatacaaccgaaagaaccattaacgcaatctgatcgaggtaaaggatctgccgagcccctcgtcgacctcgtaaccttgaaagagtttgtaaccaggagcaattccgtaaccctcagcacctccgtaactttcggcttaacctccagatggacgtcctaacagaaggtcggagcgaaatatgatgcgcatctcataatatgttgagatataggtgtgactttctaatagttgcgcactttcgaagtcaagaagagttaccacacgactatctctgtcatagagaatattgtgctgtccaggatcatcaagtcggaagcccacttgtcgcaaagcatggatgccattaaggcagtcggactgaatgtaagcccgttcaccctcggatagatcatgccagagtcggtcaagccgtattccggctctctgctctagaacaagaacatagcctgatgggaatatagttgagcaaacaatttcccccctggagatccacttggcgaagttgcgacgtccggccggctgctgggcccaaatgcggttgtaaacttccgcctccgcttcaaacctaaacgtaacaagttagtaattccaatagcaagctattgaagtaatctgactcacagctcatcgtattgaggtccccagcacttaagtatcaccgttgatccacccatagttgctagccaggtcgccttgttttgaactgttggttctgataatagctgaaggcagttaacgaccctaggggtaggtccgccagcgttaataatcacactattcgatgtgatagtctcttcttggttcgccatcgacggggagtagtaagctgaaatatcaagtagacggccggagacccgggaaggaggagggcctcgtagcttctcagtatattagcagcttttctatatcctagacagttgcccaaatcaatacttacgtttcttggcttaaatgtctcgctttcaacgtactttggccccgacacggccattaaacagaaaccagcaagtaactggcgaagggaaggctgtgtaacgccacgccaaataggcgacgaaaggagaaaagaagagtcggcttctcgtttaacaaaaacggtggagttgtaggtggacagaaatccaaaccgagttgaacatgtacgcatctgagcaacaagttgtcctaagcaaagggccaagagtcagcgaacttgacgtgaaagtgagagaatgctaggcaggcatacctatcagtggctcgaggcgaaatgattcgggccggttgatatgaagatcttcgtccgagatggtccagggcgttttcatttctccaaccagatgaacgttaccaggtctaaggctggtcgcaaccagccccaaacatacgtctggggtagtcatttgtggggtggagattgcctgaaaatcagcaaatcgggttgacgccatacctggcaccaattcgagggctttgataactgggtcgcagacattgcggacaaacctcccggttaaaccaagctcattaccgactgtgtaaagttccgtctcatcgttcagtggaacttcatgggctatgccagcttgtaggaacactcggcaagcgtccgtttggaatgtactccatagagacatataggcgactgacagacggtcggaatggattgatgggttcaatgttcctccgttctggcttacagctggagtagctctagccaactgcgtctgggctggttccatgttttgggagatggaataatcgttggaatgacaaaaaaggttctgggaccctgagccgaggggcttactgttatcgacagaagtgggaaaattgaaagacgatcctcagagaggacgcaaaagacaaggcgagaagaattcacgaacctcagaggacgcaacaaatgacgcgaggtgggataaggagatgttcgtagaagacgaaggcggggcaaattcacgatgctcagcgaggacgtgaaagaaaaggcgaaaagaattcacgtagggctgaaatatccagtttcttcacagctgtggtccactagaatcaactacgggaagacttggtgaatagatgatgagttcaagctgagtgggatgtagaaaagacttggcagagtgtataagacttcggtcgacgggggcctcacttctgcaggaagtgcagggtccacccgtggacccgtggacccgtggacccgtggacgggtggtgagattacgtaatcatacttcgggcccgcgcactttctcggttcggtattttcagcagggcttatagcacttgagggttctaacatttgaaggttctcctccagtcatcagtgatcttccccggggtcggatctttccatccttcgggaggcatctctactcctaggcaatcacactaccattaccaatttttcacgtcctgatcttcggtttcctgaaataccaatttcatattggaacgaccgtggtcgttctgttttcttgtctgttgtttgacaacttcaggggacacccagtcagcttcttccggtcggaacatctaaagttgaaacccccgattgggaactatatccagcatatctttcatcaattacagagcttatacctattttcactaggatattgttaattgagggttctagtctaggtaaaggtaggggaccctcacccgtaagctttgtcctggtccggcggggcagtgaccgtcactccagatcccccttcagtgacaacaacaatagcagtggctgtttccaaattgaaggcatcttctatgtgagccgcaggaatcaccaggggtaccggaatatcatggttcgaatccaagcggtagaacattgggaatagtatccctgcaacggcaacagccgcggctgctagcacgcccacttggcgcttttcaaggctgcgagttataagtaccctatccgagtcttcgaggacgtctataacggcttggtaacacgccgagtcaagttctgcacacttactgtccatcacggaattgacgctgtcctccaggtctggagacagaaacagcatgatcccgttttcggctgggtcgcccactgcagtggcatcgagcacatctcctgagagagtaggagttgggacctaaaacgtgttagacagtttccctgctttaaaccgggataaattgcaagggggacaaactccattggtagtatattgggcgagatcgccaacgaagaagtaatcatcggcaccattgcaataagagagtcaagagaataagagcacgagagacgaagcgggcggcattacttccaatggacggtacaatgagtgtggctattacttgaattgatgagacattacgcattatatagccatgcctttcaagaaactctgtgtatacctctcatccctccaatttactttaaataagggtttcgtacaaaaacgtacaatcctccgacggattaatgactagactacgctttgacacaacccacaaatgggtccaaacgttagacccaggacccatcttggacccattttcaacccaactttttgcataaaattcctaattaggaaggaaacttgtcttttcaggactctttatgatttgtttatgattttgtacaaaaagttgggttgaaaaatagaaaaataacccattttgtcggtcgaaaattgagttttgtcaaagactattaatgactagaatactagcgttggatatcgtacaatcgtataatgggagaacccttcggcccccaagctagcagtaagggactgccttcgtaaatggggctccatactagttctctactagtacagcaagtgactcagaaggcggtggggggcactggaaggcacaaatatctccatctatcatttgacccggatatccagcaacctgctacaatgaagcctaacgcctttcagcgagaatttcacgatacgtgctccgatggcgacatgccaaaaatccataagactcctccatatcgcgtagctcttgttccttggctactagcttatcgaaaaaaatatcttcaagtaccttgagtttctttttccaagctctttcttcatccctatgtaaatcctatatcgacttctctagccttcgtttattctgctcagctttccttatctacttttccaaatccgccttaagctcctatatctcgatggtataggctgtattcttctaggtaatttcggtctcgattacctgtttgagcttatttaacttgagcttataagcctagcgagctttgtatagatccctagcgattataatacctgctttcgtctcgctaattactttcctctggttaataattttgcgctgtagttctaatacctctagaacatacttttcagattgaagtataagatatattacgatacggcgtattgtcaggaccccagtactaagaaggctgatgcctgaagtatgacacctgtcacggtacgtggaagcacgcgtcccgggtgcgtgggggactgtggactggacaggagcaatgtatgctgcctgcacagcctctatgggtcatatgacccataacctatatattatcctcgtatgctgcttctttagggaagtagctattagtttctaagatactactatatatactaccatctctatttcctaatcctccattatatatagcattcccttaggtattctatacctaggggtcttatagttctaatagctctcaacttttatggacctctattgataaatttttggaaatgaagcttgacgagacataagaaccctcgatatatagggacagaggtcaccaattggtagaaggttttgtacagctgggatgaaagaagtaggtacaatgtcaattcggaattttattcatggagaaggaaggcttaggcctaaggactagctattatatatccctctcccccgtttgtcctcctttaataattcagttaagttagcgcgaaaagtcgcgcggtattatataccactaaggcggtgccgaagtattaaacgcggtgcattaaaagtgcgagcggcaagagagatactggtaaattcttgattctccaaagcctggatagctaatgagatcctatcctcttgctctattgaatctgtagataattgggagcgtattggtggcatggtgggtggttgaactaactaagtcctaattcatggaagcgttttgggtagggtggccactcgcttgtgaattatattaatagttgtattaggtgataatgaatcccgaattcttaaaaggctagtttgaacttgcatttatcgtgataagctatttctgaaccagtggattatcatataaaccaccatcaactcgaatgaaaatccaggaagataacttaagagaaagaggcttgatctatcacacgtacatctccccagtagaccattcgtatatgatttaagtggaactgggtacccagacttggtagtcaaacggtaaaagcatcctagttcatgtcagccctgaataggcaatcgcgtaggcaacgtactcgcaaatctgtcggaacttgacgcgaatgttttgccgctccgagaaagtgcaattccagaaccgggtgaattccaagggctcgccaggcaccttctcccatatcacatatgtgacaaatccgcccgatatgatatctcccttatcctgcttcccaaactgatatccaagaagctcgggaacaactttacagcctcgctgcttgaagtgcttcagggcttggagctctgggggctcgaagggcccgatagcctgggcagctcggactgaagccttttgcaattctgttccaagccagggtatctgctggtagatacgcaagaacccgaggggcccttgcgcaccggaggggcgacacaaaacctttccagcaacgtatgcaggacccctaccatcaatgaaattttgctcggactgggtcacgatattcccttcaatcttttcgactatctcccagatcttaggcatgaagttaattaggggttggggcggagtgttcatcgtaatttgtgtaccttcgaggccagagaggacttaaccagagttggaagagttagacatgataggttagggattaatgatgttgcaaatgatgcgattggagtgactgatagaaagagacttgagaaagttgcccaggtaagagcttgtcaaccatgggtaatatacaaaccttggacgtaaaacatgcaaacaacccaacattccctaacctcggaaccacctttcattaaatcacctcttcatttatcgacgtatggctttgttctggatctatctcgttccctgagcccgtcagagcatgatcctatgcataaaatcaaaactctcagatacgaggctgtgactttggttcgcaacgcaacgtcagttcttatttaattcacagaacaaacattatatagccagtacattagcctcggggagctgtatctgtgtggtataataggatatcttcaatgtcaacgacaaagtcctttcggagaggtagaggtagaatgaagaaaatttatcattgggtaagctaaatgacatttggggtgtaacaaccttcgaaacagtagcggtttgaataatagtaccttcacgatttaaatctactccgcgaagtcagtttctgaacctatatatcagaagaccttttccgtttcctagattgccactctgcttcccgctgaatcctctcaaacttcatagtttgcgttcgtaattcatgcaagtcatcgtatccctcatctagttcctcgtagaaactgaggtatttctcaaacttgacatcgatgtcgcttgtttcatgatcttccatgttgaaacgcaaatttcgcgcgaattcttgaaagtcttggtcgatgggtctatagtcaattggctgtttcccaagaagggcatttttgaaccaaaactcttctacttggacgatctcagcactgcaccgtttgcaaatatttagcccaatttccacttcaccggcgcaaagatcacagcagtcgatcccctggtctttgcattccttcgcaatagtccgccagtattgaacctcccgagtgacaattttgtaaatgttgaaaattcgcctggcaatggatggataaatgtatccaggttcctgccaagggtaatgattgcgtaaaaagagatacgcgctcatcccgggccgtaacgaaccttggcgaacgggaggttcgcaacccagagataggatccaatctacaaattgaaatccttctgagaaaataccataagaattgttgatattccacctttttccagctttatcctttcctaggccgcggatgttcgggaccctatgaatccgcgaggtgtgatagacatcatggttctcaaacgtgtttttgattgccatacctaaagtctctggcgttggtaaatcgggtggtccatcaataagaaagacgcataccgagctcatctggcgtccagcatcgtgtttatggccgtgggcatagaccagaacacacccgtccgtggaaacatcgagattaccgaagttaaaaggctccagtgaggaatttgacaaatgtatctggtcaaaggaactcgatgtatgcaaaaatggttcttggggttcgagttcccctttcttgaacaggttgtaaatgtaatggacgatatccctagggattgcattgctagccaccaaccgaatctgaaatcccccgccacctattctcagacaaattcgtcggatggcagcgaagaggatatgtctcgtatttcccgcatgaaatttagcgatgatattcttcagcacttcgatttcacattcgtttctcaccaaaggcggcagacaagttactcgccgggggctgtacacggaggctgtaacaagatgctcaaatgcatcttcagcaacggcgatcacggtcaactcccgaactttcacccagtttggtagtaggaatgaagcatatgtcactgaagcatagaatttggtttgatcgagatgatgtgatcgtggcatcctggaacgtccagtccactcctcctccatcatacccaggcaggcccaacttatcgatagaggagtctcttgtaactttgtgatgatttgtctggcgaggattttcctagcgtgatcttgggttgattgtagcatcgtcgtcacattgtctcttgtcactaaaaagcaacgatattgactctcgacaaaggtggcatgtcgaatgatccccagctggttgtccattgcttcgaaacttttaagaccccgatgatagctgtcttggatgcttctatcgttttcatccgacatgttaggatgtattgctgtgaatgtggaaaatatgtcggtatctggatgaatcatgcttgcacaatcattctccccggatgctatgatccttagtttgtttaatatgtcctcgcgatatatgtcacgagcccactcaaagacataatcgacaatcagtaggagttgcaatgccccatttctcgatgtaatagagcctccccatagatcgaagatttgctgggagaaagttagcatgtgccatttttacaggaaacgtctcttggaacaagacccgcaggttaaacaaacatattcagtagtaccgatggtcccaggtttctcgcctgcatcattatatacgcatgccacagacactcgccaatcctctcctctattcattagtaaccagactaatggatcagcctgctgcttcgcgtgcggctcagtcatattcttcaacaactcctgcgtgcataacagagtccgcaccggaaacgcggattgcaacttaatggaattccaatcgctatctgccgacttcgccgacttcgcttcgagaagaagaaacgggaacaccactggatctccatcctcactgagcggcggatctcccaggatctcatgaacaagcatatcgtgatcatcctccgctctatgtatacacgctgtatcgttcaagaggttttcaatgtttcgagtctgccgaagtccgtagattgcatccggttttgttgcacttggtagttctttctggatagttgagtcgtggtgtactggttcatcttcccgatggccaaaaatccgattcaacccgacagcttccattctgcgtggcttgttagtgccagtgactagcgggtgatgtgttcctaatctgtaactcacgaatcctcaagtctgaagtctcgcggacaccgacagggctctcgtttattctgcctaacacgcagggcttctgtcatagtcgagttcccctcacttgtcgcttcgatttctgaacgccatactcgctttcgacagaacttgctgggttccaatataagccatcttgttaatatcgttggaattagaattcctaccatacgacctctgaagtaagtcgagctaatgcgtagggttcgcacgcaaaccgccaggtcgattcatttcgactcacacagcgcttagcccgctcagagagttcatcggcatgtttctttatttctgcagtccatggtgcattttcaatggctgtcgcacaagccgcataggtgtcgaattgcctctttcctagctcatcaaccgcattaaaagtcggacgatggctatcgggccattcagagcttggaacctctccgcggaattcaattctatacttccgtttgagtctttcgacctgcttccgttctttggatgtgaatggcatgggtaaagtgtaggcctgagacttgaaaagtgaaagagtatagctatgggcatcccgacagttgtctagatataaatactaatatatagtccaacactgacgtatgtggaaactcgcaggcgaaacttcatcttcgcggcccccaatcctagtttcaaggaggtaatgaactaatattactgttgtagctgccctacagcgtagggagagtcgggatcagcgggcagctccgggccgttcatctaggtagcgatcgccatggggtcaaactgctggatttgagtttcggggaaattaatctagttcattctctgcccaaagctctaagtaaagatctagccagaagaaattacgtgctagataagctagagtagactgagtactcctttggaatcatggaaggctctttttctccaccagtcctctatgctcttagaaagcttcttcaaaatgtcccacactttcagtcttcttaagactccactcactttggtatccatatcacgcgacaatgctgactacgttctatagtttgtacagtgccgccgccaagtgcgacggggcccaaaaatatttcaagtactatgcgtgaactagacccggggctgtactgaccaacccatgtaaccctcagatcggttgagctagacttattgtactgggtgatcagcaactggttctttgtgcgccgtggcttaggtctgttcctgtgaagcgagtagaaaatcaatagccaaatcctcatctcgccatcccctttaagccagaaggtagtgtgccctcaactgtattccagtggcgcaagattatgcgctggtcttagcttgaaataacccgccaatgaggtctacatttgaccactgatgggactggaaagttcgccagtcggcctttctcaatcaaggatactaacgcaccttgtagtgctacccataaggaaattgaaaacgaatcaacaaatatgagctgctacccacaatatctaaaacttcattttcgtaggttgttagagaggaatggcccgggcaacaaccaaagtatgatgaaacaccagcgcagaaggtgaaactaccccaacattagtgtggttacatcgcatattagttccgtttcccgaaataccaaattcctctgattaacggatatatatagctttctaacctgtctaaataacagggtaaatattacacaaattatgcgtactggcgatatccactgatgtcttcattaatctttgaaaagtctctccaatgtcgacctcatggtttatgcgggtcccaaccacctatagggtctttttgcagtcagaatctcacgctcgggaagaaagactggcttcttcgtccgaaggcttcctcttcaatcccatggcgaggtgaaattgagacggaaatcaatttagcttatacttcacaatctacacttatgccgatatctttgtcagggttgtgagaaaagatatccttacaaagaatagagataattttgtgatatgtatcaaattcatagagaatggattagtagatgccttcattgattttttcttctggtaccggaatttccagtatcaacggcggagggatatatgaaagactaaaagcctagtcattagtacgagttttgtgccaacgcatacttgcattcttcggcgcatgcgtgtgacgaagcaataagagccgtcatataccatggtgattaggtacccatatatcaaagcacgacggcagatggagcggggttttgtttgatgggagctagataccaccttccttggactatgcgagagttctaattcggactccaaagaatcgctggattcaataaaatacttagacaacgagaacccgctgacaaagtacagctttatcttgtgaggattttggcctctgttcagcggaccatggccgaagactggctcattggttcccgaaaatgcaagaatcattctacgtggtatttcgagattggtcagacaggtgtacaggtggcagcaatcaagtaagctttactatcggaggcaccatgatggcaagcctctcgaacgttgtttgctttttttcggtggtctatatctactctctatcccccccttccatttttctcttcttgcccaccctcatagcgaaccttttcttgccgtcataatttgtgaaaatactggatttctgacgataaaagccagctatcgcactcttcaaactacccctaccagcttctatccgatcttttgactttaacacgcatccttcatcaaggtcaaaagaatatcttgatcgtttcattcttccagctgctctacatgccacataagatggttccagctaaaaataagaagcccatagccaaatggtctatgtatccagctcttcacgacgaggtatcaacattgttggtcgaggaaaatcttcatttcaaattccatgaggatgacaatgacgcaaggcgcatcagagatcatgatacaaacataatgggtcgctttgtatgccataacccaggatgcaaatccaaaggatggtcaagcaaaatgatcgccgtcacaattcgtctatacccagggcaagaatataatgcgagggtataccaccaacactgtaaaacatgcagttgggtcagtcgaccagtgctggaccagtcatacgccgagagaattgtctaccggatcaaaaaatggaacggagtgccagtagagacgatttcgaattccggcagcagcagaggtcctcacaacagaaaactttgtgaggggtgcaaagccggacactgttcccaatcaagggagaatgcaggggtggattttattgcacaactagaaaggtttgtcagtctcaaatcgactaacactatttgatactcgtactgacatatgcttagattgactctctaacggaccagagatccaagtgggatatagaaaatcataatcacggagaacaacctttcatatatctgatccacctttgagaaattagggcaaggtgtcaaatggaatactatgggacaaagtcaccttcagtgcttattctctgttatgaaaaccttcaataggcctataaatcccagcaccactttgcaatatcttgctatttttgtagacccatatatatattcctgcaaggctttcaaagagcaaggtgtccttcgcaatgagcgaaaaacaggatcgacgggtttggcacgaaccacgatcttgaggactaggacccataattcgagccataaagtaaccaattactagggttcttgcgtggctgtgtgcagatgccaagatgccggccgtttcagctgagtatcgtggcccaattatgttgtactcttgctcggctgtcagttagtacatactgtattgtatgtagttcgggatgggtgactgcgaaggtgtatagcggccagtggccgaatgcctaatgttgcagagctgatgccttaaatgcctgatttatgccgcctataactactgtgttttgtaaacggaaggcactattgtcttaggggctaatcctgataaggcagtgtacctcttggcactctatttccagtatgcatggcgttaattatagtctcgctacctcttatagcagtggtatcggcccctcccgtagtagtcgaatcgcgagcttattcttaggaaacttcgctacgctagagctaggccgggggaagatagtggataaggttagaggaagagtaagaatactcgaattggagggagatggaggtttgtatagtaagaacaactttaagatcaggaaataaataaataaacaaatatatacggtcggaatatcttcaaactaccaagacttaggcgaacagagacttacatagtaggaatagctttattttagatgctctctgtcgttgtaatccaggtatttgccagtataaaatcaggcaaaatcaggcattcgaccgctggccgctatacaccttcgcagctcctcgtgtaacgaaccaaattacatggccatcccatacagcatgccatcattgccacttttcactcagtcttttcacgtctttgaccgttcggaaccttctcattactctgccaggtgaccaccagcgaatccatcctcactgatgtatgtttttgtctttttttttgatttgttaggaaatcccctcttgccgccctggtacatttggattgcccctaactactttaggtagcttgtggattagttctgccgaagttctgatacgctaaagaacaacgcgtgtcggtagcatttctcttctctatactagatatatgtagccctatagattataaggcgctttttctataggaataagagcggagggaagttagcggaagaggaagggagataggaaatttcactttggttcttccgccattccacaatgtattatcgcgacatctttcaatcattgtcacgccttcaccttcaaattttcggtttcttcactcatctctgatcagctttttctctttctttttgcactcttgtcatcaaatcttcacaccaacatgtctatcatgggatattcagataattgcctaggcacacaagtgaccttcaccactccctcgcctcagcagtgggttctcgaggagaaactcaccgaggatttctaaagcattaccaaccgtgaatttgagctgggtggtggaccttccttcgctgtgtcaaagtacctctgctacagtgcgacagatagtagcaagaaggcattcatgagaatttactttcagattcctaaccccggaatagagtcccagctcccccagcttcgatgataataggcagctccaccccgtcagcatttggagctaaaagctcgaaggatctcagtgaataacactgtactatggtcccagctctcctcgcccacaaagaaggaaagcaaggcaaggacggcgtggctctagacggctatataacacatattgtatgggaaatggtccgtaggaagccacttgatacagatcagttctagaggcctgaatcggcgcatttatacaaggccgttcgcacgaagttccgccgtatctaggagtatgtttacagaatccccattagcgtgttaagagtgaaactgacaaacctaagagagttgaagcatcatggatggcatccatagctccctcttttgcagaatattatatacgagtcaaccggaggtatgtatgtgatatacgatatgcacctattatgaaacagaatatgcttactgtctttaggcacattgcaggtttccgagaccccgaccgcttcgatctcgacgaggaattttccgacatgacctttgtcctctggcgttcaactaggccaccaagaaagtccggttgggagaaagaccctaccaagtgggcctgataatcatcatggatgcccgtttccccagctcaaatgtgttgcgccaatgaatcgaatttttgccgcaattacaggaatcgaagttgatatcgaatgacagcgtaagacttccaatttgctaactaattgtccgcattatcgggccgaccacagtagttgctcttttttcttgggcaaggcggaatgctttttgcaaatcatcaaagttcccagtttaggcggccacaatatgatacaagatcatgcctccgcgattggaacttctatggtttccgcttgtgggtcgcgtgtggatatgtcggtgcagatatgtatgttgtatggagttgaaaggaagcgggggaatttctactccgtaggtgacggtcagctaccgaacaatggtacttgtagtatcgggaataattgccaggcaatctccaagagccacaatatccacaatgaactttttcagtagtggcaccaatagtcacatgaactggcgtcaatagtagcaaggtcaacccgatcgataaacctgcaaatactaggctctaacaaatccactggggaaattgagggaagtcggtcttcagtttgttgtctcttagaaaagcctcggcacaccaggcacgtgataaggggtaaattgttgcctggtttgtcaggcgagcaaatccttgcacgtgtttacttctcctattatctatcatgggccctcttagagatttccctcaatctattgggcataccaattagattaatatcgtttttcggcccgaattggtagaattccgatgtcatatggccagtgatcactattattgtcggcttctatcactcttctttcttttcatgctacctatacgtcttttcaaggcgaagaaatatacatttcatcaaaagtataagcaatcacatgcgcaaattaactaatttaactacattccccggaaacccaactgatctatcacgtttgtacacgtgcacactaagccaggtcggccaataaatctcctccgatatataaccacccgttgccgaaagttggtcgatctccgaattttcgctctctattactccgcatatctacactaatcctacaacgctgtgggttaaggtgacaatgcataataacgatctgcagagtgagcgacgtgcagacatgattggccctaattgcattctatcgtatgcaaatatgttatgcttgtggtgtctgcgccgagacacgaaagtatatatagagctaaatcatataatctttgtgatgtagttttgagacttcagattctgggactcatttataacaacattattcggtcatggggggaattctatcgctcaaattgctgccctttgtggctagctgcgcctttgctggtgtcaattatcctgagatcccgaaggacttgactacaccattccagcaacgattgacagtctatggacctaatggtaagaagaccggtagatatagtgggcttggagaggactgacttattcatctttagctgtgtcggttggttggaacacctatgaacagctgaatcaaagttgtgtgaattatggcttgtcagaaaccaacctgaataccaaagcttgctcatcctcgtcgactacctacgatccttcccggacgtggtcaaatgttgcagtcctaacaggcctgacccccgcgacaacctactactacaagattgactccaccaactcgaccataggccattttctcagccctcgcacgcccggcgatagaactgcattcaccatggacgtgatcattgatcttggtgtctacggcaaagacggcttcacaagcaaaagaagcacaaaaaaggacactattccagtcatcgagccagaattgaaccacaccacaattggtcgcctcgcggaaacaatagacgactacgagcttgtcatccacccaggcgatttcgcttacgccgacgactggtatcttaaattcgcaaacctgctcgacggcaaagaagcctacgagtctattatcgaacaattctacgaccaactagcaccgatcgcaggccgcaagctctacatggccagcccgggaaaccacgaagcagactgctcagagattccatacttgaacggcctctgcccaaaaggccagaacaacttcaccgagttcatgcaccggtacgagaaaaccatgccgcagtcttttatttcgtcgtcaccaaacccaacggcccaaaccctggcccgaacggcccgcagcctttccaacccacccttttggtattccttcgaatacggcatggcccacgttgtgatgatcgacaccgaaacggatttcccaaatgcaccaagcggccaaggtggctccgccaagctgaacggcgggccatttggcactgcgaaccaacagatcgagttcctcaaggccgatctcgcttccgtcgaccggtctgtcacaccttggctaatcgtcgccggacacaggccatggtactcaaccggaggatcgtcgaacgtctgcagtccctgccaagaggcgtttgagggcctgctttaccagtacggcgttgacatcggtatttttgggcatgtgcacaactcgcagcggttcatgcctgtggtcaatggtaccgccgatcccaacggtatggaggaccccaaggcccccatgtatatcgttgctggaggccccggtaatgttgagggtctgagctctgttggcagtaagcctgcttatacggagtttgcatatgcggatgactatagctacagtacgcttaggtttttggatgagcaacacttgcaagttgattttgtgaggtcctctactggagagatcttggattctagtactttgtacaaggaacatgcaacggattttgtggaccagtaatggaagtttggggataatagaggctatttagttatgacatagggcgtgggacgatgtgatagtgaaatagaatgtgaatttctgtttacagggctttttagcacaagaaagtgtgaagacctagtaatgtagggaagaaaaagagtgtcattctataagaaaattactatataaagaaagaaataaagaaagagagccccaatatttccaatgccatctaatatgcacaatcatccatcccatcaattatttacatacgccttgcctcatatgaccatatatgcatcaaggatctaatgtaaccaattataaaagtacagcccatgtcgtatatgtggctctcatcgatgcgatagctgactattccactccttcgggggcgtcgtcgaacaacccgccccagatggcccctggaagccccagggctcactatgcacgacagtctcggagacaactgtgatatccttggaggaaggctcagatggagcgaggatatgctcatcgctgccccacgcggaggtctgcatatgcgttggcgcggcagcgttcgttttactctttttggtgtcgccttcgccgcgggttgtcaagctctttaaacctcgactggagagctggtatggctgtcccgacgttttacccgaggaactgaagacgtgggagagaccaatcttcctgaagcccttgcggataagtggttgaatgatgggcaggttagagacaacgattgagacgaaagtttcacgacaggcccatttggagccggtttcagcgccgtcggggctggactatagtgcatatgtcagatatatgcgtaaatcacaggtgtgtgtgtttctgcgtgggaatcctattattgcatgggacgtaccttcataattgtaaccgcccgaataattcccgctatcatgacgaatgtagcgccggaaaagagagccataagagggatctttcgtttcagattgatgttgacagtccaaagaagaggcagggggattgagagaaggtagatgtccgtggtaatgttgagtatcacgatgacgaaaacataaacgggggagttggctggctgacagaattctgtaaatatatcaaggtaagaagactatggattatatctgattgtggtgtaactcactgccggggtcggggtagatctgccaaaatgcatggaagggctgacatgacagtaggatcgacaacgctgctgcgaggtatgtcacaattagaaggacataccccagtcgaactctggtaggaagatgttggagaccagtcctgtgatatgcttagcgcattggttcgttatatccaaggtggtatgtgaagcgcacgtcaatcgagagtagaagactgccaagctgaatttaaccagccagagaatagccgtgtaaaatgaccatccaacaatttgggtcttggagccagcaacacggtgagcccattcagtcgaattggggtcaagagctgctcgagcttcagacgtcatgtaactgttagtaaggccctggtatttggcaccgacgaggtatgctgctactgtttcaagtacgaacaggatctgtcaaaaagcattatgttaattataacttctttcaatggtgtttacaggacaggtgaagcaacttactcccgccaatggcatgagataatcatcaagttggaaatcggccggtccgacgagcttccatcgtaccccgacacggactaatattatgatcaaagccaaggacaacaaagtccatgcttcgacgttaccggccattcttgcgagtcgtcagttgtcagcaaaccaaaggacaaaataacggaagatgaaagcgggagttggagagaattataaagaaaggccccagccagaccgacccgcttagaatctccagaatatacggagtcgggatttacactataaacttgtgcgactagcttgccaggctaatcgcatagtgcgaatagcctacccctggaggatcatccatgtaaattgtgtaattttgtaaatttgtgtcgtcccaccggctccataaaatccaccccgctaagaggggtagatctgtaattggtgcgtggccgacggtccgtgagtccgacacgggcgggaggctgatacgaggggattacgaaattgaggattacgcaccagggatgcgtagaaaattacaaggctatgcaagccggcaaactgacacttgcctgtgatataaattaataagattcggacgtagaagccgaaaggggaagttgaactcaaaaagtataccccagccctgccttgaggtcccgtatggagccgatcaaactcaaatcttggtggggcggtggggctccgtaaggtcgagccataatgtcccgacccacggctcagccttcggaaagatttcggaacccgttacacgcgctgtggggatatccgtggtgacgagccaactaccaagggtatcattggccaattcatgaaacagcttgtccaggtgatatagggcttcaagaattccttaaataaccacattgggaataggcccccctctccccctattgtcctccgctgttctccgaaatcacgtatttattcttcgtttcctcccaataattgaacacaaatttccaaatttccaaattttggtacttacgttttggtgatttccacggttcactcccagttgatatccacatcgtttcacaaagtgcaatatgtccacctttgactttatcatcgtcgggagtgagtgatcttcattatgccctaacttcgttagcccttatccctaatccgtcttgcaggtggtccgtccggctgcgccctcgccgccggcctcgctaattccaccgcaagaccccgtgtcctcctcatcgaagcaggtgacaacaaagatgatcgcaaccttcgcgtcgacggccagcgatggctgaccttccaggaccagtcaatgaactggggattcaagactgctccgcaggcggactgcaacaaccgtgagatcgactatagtcgcggcctgtgcatgggcgggtcaagctccatcaatttcggcgtgtacactatcggcgcacgcgatgattaccaggagtgggcgagaattgttggcgatgacgcttttgcgtggacaggtgtgcagcaaaagttcaaggatctggagacattccatggtgagattccggagggcatagatagaaaatacgtggctccgaagacggagaatcatggaggcgagggcccgttgcatgtgggctttgcgcgggagtgggaacgggatttaacagacctcttggatgtcttcgagcaggctggatttccattgaacccagatcataattccggaaatccgattgggatgtcggtgctgattagctcggcgcataagggcttgcgctcgacagcgggggatctggtcaaggagagactggataatttgacaattgttactggagcccctgtgcagcgtgtcctcctcgaggggaaaaaggctgtgggcgttgaatcaaacggaaataaatgtgaaaacctaccttcgctgcgagtgacccagatattaataattatgaacagatttcgccacaaaggaagtcattctatccgccggctcgctgaacgaccctcgtatcctgatgcactcaggcataggccccgccgcccaactccagcaatacaaaatccccgtcgtccacgatgcacccgctattggtcaggggcttcgcgaccattgcttcgtcccgatggtaaacactcgtacagaaaccagcacagaccgaaaggccttttatggcgatgaagccgcaatggaagtcgcacagaagcaatgggaagaagacggaacaggaccttgggcgaaatttgcctgcgagttgggcattggctggttcaagttgaccgagcagctcacttcctcgccggaattcaaggccctccctgcagacgaacaaaagtatcttctacaggagaccgtgccgcactacgaggtcctcacccattttcccgttcattgggtcatcccagatttcccggatgaggcgttgaattactcctgtctacttgtcttcttgttcaatgcgcagactcgcggagaagtcacattgcagtcgtcagatcccgactctccgctctctttcaaccccaagttcctggcccacccattcgatcgccgactcgcgatcgaggccttgcgcgactcattccgtgtcgccaagcacgaatcctataccaaggacaacgtggctgagctggcaatgcccaagggtgagtcagacgaggatttgctcgagtactggcggcagaatatttcgtcgagctggcacatgacaggaacagtgaagatgggcatgaaggatgacgtgaacgcggtcgtggatccggatttcaaggtgataggtattgagaatttgcgtgtcgcggatatgtcggttgtgccggtgttggtaaatgcgcatgtgcaggccgttgcgtatgtcactggtgcaatttgtgcagagaagttggcgagggagtataacctttatttggatcaaaagcacctagcagtgtgagtaggctctaacgcaatgcaaattgcgtattctagttatgtggtgttcttatataaacggtacatataattgacattgtttttcctcgatcctcagaatagttagggaatagttacatagaaatacacgtataatatgactaattgttatcaggggatcacgtagcatgttgatcaactccgttcgatgtcattgaaggaactattttccttcaataatctatgctacccacttttacggcaatacgaaggtacatatattataaatagtagtattttgagtttaatgtagatttctgtgccgttaaacttaaagataagtataattataaccctattgttgtaatatatagtggggcgccttaaatacataccagatcataccgtgggagatacatagcagaagatcgatcagataagtttgcgacatagcttttgtttggatcgttctctctgtcatttcttctcttcttcttccttttttctctggctttaatctttgagtcaaatggactctttccatcgatattagatctgccttgtgacagtacctaggtattgtatgtcgtggccccgatgatcattaccaatcctgtaaggaggaagtctaggcatttgcctatcatgcccgtaaaatcgaaggatcgtcggagagcagacgctttaaaacccaaggaggtttgaaactcgtaagacgtagtgcatttagagtggtataatatgccatttttgcattataaccctgcacaattatacatagaaagatctgccctatggtttactactctagctacgaaacctgaaaggggaaagcttatctggaaaaagacatcaaaaatactactaaaaagacatcacgaggccgcataagcgaccgactattgtaatccgacatcaatccacctggttcaaaattatcgagcatcttgactttcttgatattgtggttcccatcgaggcgcttcaatctatgtgtcaaaattgatccgtgcacgaatatcataaaattcatggaaatgatccacatccttgagtcttcgtccctcttcgcatcttgactattcttctcctctcaaacccccaaggcatgaggcattggaaagaaattattatgagatgtcaatatgggaggacataaccagtaggccctaagccgcaacatcaaattattatattacaaccttcgaaccttttcattgtatatctcgcgttagtcctatagtatttcattaactttggttttgcctgttgatcaggaaagaactacgtagcaattgataatctatattggtgccctccctttttatccaggaataagaattttcatgaaagttaaatttctttctttcgattctaaaccatcaatgactatccaaaaccaatctcaagtcgaaagtatgatacagtacatcatgccaagactgaaacctataccggggcggacgctgactccttagtctccttctcccgtccccgaattttgcgtcgctcgacgatcacagcaccaataattttaatgcaacacaaagccaatggcaacagccacatatccaccattgccttattgaaagcgtctaggacggcgatcttgtctgccccgtgtaacccgttggtcagagtcatgacacctccggtcatgatttgactagtgtcgatactggggatatctgttttggcaatgttttggtctaggtggttgatgaagagggattgagcaacgccagtaaagattgcactatcaataacatggcagtaatttatggctttatcattttccccttccggtaggatagattctagcaacacaataccccgacccaataagaatatccaccaaatcaagcacattctgggcgaccataaccggcgtttgagcacatacacccatgccaaggccgaagagaatttggtacccaatccattttcccgtgccgatgtcgatcgtgaatgtggtgaacagacctgccccgagggaaataaatttcgaaccaaaaatgaggaatggccaaatgcggtccgattagaataccaccaagcagcgaggatagggcattggcaatgcccagaggaagggtgtccacaccagcgccgaagggactcgtccctggagctccttggaaccaactgtagattcattagcgagtcggctctgtcgcgtcatgcaagacatggaatgtaatggaataagacatacattggaatgtaatagagcagcaagaacgaggcaccatccattcgaatatatcggtacttatagagttagtagagaattttcattgccaggaaggtgccgcttactgggaacccaaatctcatctctttacgcagattgtgtgtgctccgtggcatcaaacctggctgtcgcgaatgtgtacttatacattgtacgcttggtaaagaccgtactgggatggtttttgcactcttatttctccttgctggggtgtccgataccgttatcgccagcgagtacggcctcagcacagaaggccttgcagggtgtgttgacagcattgagagctatttgaatcatgctaccgaaaatcgtgatgacgcaaggaaaaagccgaagagatcattgttgccaagtctgtttctccatatttgtgaatttgatcagtcatctgactcgaaatctagagaagagaacatgattgcgagaattaagggcattcgggacgagtatggcacggcagaaaactattttctgcgggaacgcggcctttctgacgaagatctgcgatgctccagatcaattttactagcaggcgacgacttgaacattccaacagctaaagggggaagaagtcaacagtcggcattcacgtgaatgcaggaagcgacattgcgtaggctgctgccgatatggtgttaacgagagcaaataagtagatgtgaactgattcagcagagttacatagaatatgtttctatttgataaaggatctattaaaaatacatgataatgcatgccttcacatatccatccacaataattacaaacctccgaattccgaaaatgtacgaagacacccaaattaattaggaactggcctcaagctcactcagaatctcatcagcggccttctcggcgaccatgtaagtagaaagcgcggtgaaagtaccggggactttggggtaaacggaagcatcaacgacacgaagaccagagacaccgcggacacggaatttggagtccaagacagccatcgcgtcatcatcagcaccaatggggcaagtgcaggatgcatggtgaccccaagtaccatccttgatgtaatcgatgatgtcttccttggattggacatcagggccagggagaacctcagtgatgttgacggcctggcgcttgaacgcgtcacgggcaagctggacagcttcgtacatagcagtgagatcagcctcgtagtcgccgacaccagtgtcgaagtagttgaaggtgatcttaggcatgtcaagaggatcagcggactgcagaacgacggttccggcagagttgcgggggtgagacttgagaatagcccaggtaaaccagttgtgttcgtcagtcgcattgatactgtagtcggggaagtagccacggaagttaacagggccaccgaattcgaaaatgtcgaagtcatcagtggccgtggagctcttgtatagcatggtggcggcgagaccgggggatgagtaaattccgtggtcgccaagaacaggagactcccaatcactgatgcaagggtccgcctggtcgcgaatgctgaaggtgcacgtgtccaagcaggagaagtcctcctcgacctggccctgaacggagatctcatagtggtcctggaggttggtgccgacaccggggagatccttgatgaccttgataccgaacttctcgagttcctcggcgggtccgataccactcagcttgaggatctggggagagttgtatactccaccggcaacgatgacttcacgagaagcggtggcggaaccgggggtaccagaaacagcggagttcgacagaggactggccctgtagaggtgctcgccatcgaggaactccacaccggtggcacggggtggggtttcggtctcattgaaggtcaccttggtgacgtgggtgttcatgcggacatcaagagggtacttcttagagccatcgtcattcgtagcatcgcgtacagagatgatgaattcacgggcaccattgcggtgagcgtcgtcggtggagatagggatctggtagtaaccgggctcggtgtcacgggtctccgtgtcagcattggcatcgccaactagcagagtgccaaggttcataacttgatcggtcgtgttaccgagcgcaaaggcaccaccggtgagcaagctcagcaactgggtatcctctaagacaatgctgaggggcgcggtttcggtcgacaaccagccgtcgtaaccgtggccctcaactgcgggaagagagtaaccgttgttctccagcttagtgaagtacttgcgcatattgtcgggtgcccaagagctatcgttggtgatagtctgaatgtattcaaagtcagactggtaaggatagactgcaatcaaagcgttgtgggcagtgcaaccaccgagggtacctgtacgagggtagagggttcccttcaaggtcgagccctcgggagggttgaggccagtgtatatcccgccatcgggcgtatcatagctagtcttccaatcgcgagcctgacgctcgtcatcttcgtagtggtggacgaaaaagttccacgaaagcttctcgtcttcggaggctctggcggagtaggcagggatggtgtagttgtaggtttcaccctggtcatcaccagcctcaatgagcagtgtcttgtgaccagccaaagcaagtcgggctgccagaggaccaccaccagcaccggaaccgacaatgacatattcataaccggtgagttccacagccttggccacgccggacgtggcgaccagcaggccaaagatataagcaagaatcatattgacaaagaaggactttgagtgacttgaccttgcagaagagatatcacccagcttttatgcatggggtttcccctgaacaacggggatggttcacgtcgttctccatttttatcaaagccgttgaatacttggcgtgcctcggtctccactagctcatggtgatctacacggagacagctgagcctagtacttttctaggacaattcccgaacgatcatcagtagtttaatgcgtaaaccttacatcgatgcagatcatcaagacggatccacatgtttcgggggtttctcctttccagaacgaagcatcactagcagttcgctattgccgagacagtgcggataatttttctcaaagctgagacattttaatccctgccatctggatgctcaataccatgttaatccatgtcatttggaggctcaatatgttaagtggcaggctttcatcaaaagggggaagtcaattcaagattctatacgaggtagatcagagagaggagcaggcacccaaaatggcaaaagagggaaaaccccacatctgcaaagaatgcaaacatcgagtgataatcctctgccgaggcagatgacaagacatgctctaccgagtccaccttggccaaccccaccaggactaagaaatggccgccaaaagctcgttaggccatgcatgttcgctcgtattattccgaagaagaccggtttgatcaacggagaaagaaagcagagtatctgacataggcttgcgcctgtactccgtactgtgcggaaagagagcgtaggcggtgtggtcatcggaggccttagctacttccggctagatcaatatgactgtcgctccgcaaatgttgaagggtcaattattgcgaaaaaaggatcgactgtcaactgtgggatgtattgaatcgacagtaatgggagtgatcccccggaagatgtgcgtgatatgcacataaaaagatgtccaaagatgcgacaagcatgaccaaacggcgttcggtgcccaggaagaaagggaattgccttccttagccagcgacactgcttacgctggcggtcggtaggatcgctgacactacggagtagacccgcagttatttaatggcaaacttagtggggaaaagaagatcagaacgatgaatatgggtaaaaggagatttatctcgccaaaggcagacctcaggcagttacagaaattcatcatgaactgaaggggtggaagcgtatttagaaacactttcgtcttagttttgaggcaagctttacgtcaatcacctgatcaaataataggtatcaatgacgtagggaaggatgtagtctgctctatctactatgggatgtaggatactgtaagggggaaggagactggagaagaatatgagcttgcgttggcttcaccaaaaggctactagtcaacagcaccacggagaggtccaagctcgtggctgttggatcccctgggagcatactgctgtcccaggagaccccggtcttcccagaagacctagcagaatctgggttggcatctgatcggctgcgtgtcgaggtggtcggcactgcagactcacgtctagcagaatctgggttggcatctgatcggctgcgtgtcgaggtggtcggcactgcagactcacgtctagcagaatctgggttggcatctgatcggctgcgtgtcgaggtggtcggcactgcagactcacgtctagcagaatctgggttggcatctgatcggctgcgtgtcgaggtggtcggcactgcagactcacgtctagcagaatctgggttggcatctgatcggctgcgtgtcgaggtggtcggcactgcagactcacgtctagcagaatctgggttggcatctgatcggctgcgtgtcgaggtggtcggcactgcagactcacgtctagcagaatctgggttggcatctgatcggctgcgtgtcgaggtggtcggcactgcggactcacgtctagcagaatctgggctggcgtctggtcggcaggatggttgtaggaagaagaaaagggagaaaagaagggggggaagagcgccccttatatattggcttgcggcctcaggtagcactcgtggaccaaggatagaaaacggaagatttgagtttcaccttcccaaaacgtactagtagctactttattgaaggttaaatccactgcaactacggagtagtagttagggtttactatcggagctgtacactttagagggttgctctggctctattacttttgtttgggaataaattcactcataatactggaggtctatagctgtaccataatttgaagattcagtcatcaatactagaagaaaagaagaaacaacgttgggtactgagatttgttcataaccaccctgtaatatgtgggtacagtgttgcctcactttccttggagatatactgttctactccccggcttcagtggccatgtcctgcggtccccatccacttggtcaataatcggagtggatcattagttggagttaaatctacttctaggctttgatttatgttttactgcaaacctacttcatgcatttgatggtgttccatattcccatacggagtcggacacacgttgacaagttggcaattcgctcgtacaacatagagtccgagtggcgcaacaccgcaatgattggattcgaccgtgtctgcctcgatattcgagatatatgaggtcacacgtggaagatggacacatcgctcgaagtctagagcaacatcggaaccttggaagctcccctatgggtaaccatccggatgacttgctggtcttggaacgaattattttgctacattgactacgcaggtaaattccccgacggcagatatggaccggtctgctagatttaatttgtaaaagaaatagatagttggaaggcatcgctatcctacttccaaattttctcccccgcaaccaaatcaaagctccgctcgtctggatgctttttcttttctttttaatactggtggtgttaatgagagaaagcaaattattgatatgtcaggatctcaacctaactgtacccccgcgtgcaaacttttttgctctttggttctcagatatcgaggccctttgaaagtgtaaggtaaaaaagcccgtggccgaatccaggcacgggttatcctggggctaatgcctcgggcagaccgtcaagcctaaataaagtaagacatgcccttctccactttccttctctcctccagccagtttcatcaagcattttcaacaacactttcttttcaatatggaacctcttgatgaccagaacattttttccgagttcgaagatgaggagagaaggcagctcatcgaggagctgatacgtcaggaccctagactagcggaactcccgcgtacgaacttttttactctttggttctcggatattgaagtccttcgggtgtttgccaacgtgcttcagaggggtgatcccaatttcaaatggcgaaaatatcttttgtccacccccgacccaagtgatgtacctggagtctgtaagtgcatcatcgtgcatcagaaaatgcctctgtggtaacaagacaataagctaaaaattgatatacaaaacagtcgcatcaagtaagcaggccaataagtcgtcctcgaaaggcaaatcttcctccgggtctagattgcctgtaccagctcaaagccccgcgggcaggactcgctccacgtctcctcgaaagggccagccgggtctccgcgagcgttcgattaacacgccacgtacttcttgggatgaccagcaaaaccccctcggtgaatcgtcaacttccgttcagcaaagcccctcccttggtcaggatttgactttggttcatccagaaagacaaaggcgagacgacgctatgaagaagaagatactctgatcgagaacattgagacaggataatgctaacttccttgccctttagtgcctggagcgagatagtaacaggtgcatcataaccaagcgcgatcaccccgggattcagtgtgcccatatcattccctacaaattgaacggttccagcacccggggtgcaacctgggaatggctcgaaaatttctggggtgaggctcgcgccgacaggtggaaggctgagctcctcggtggctcaaatcaccagatcaataccgaacaggtcaagaacataactactgggataattgcctgtatgctttccgccacttgagaacttacgagcaggacacgaaagtggacattgcgttccattggttgcctcttcgcgggagtgagaagcgaaccgacattatccccactatgtcccatccattccctaatcaaccccaaggatatgccacatctccaggtggcaacagatagttgttgcattgtgaatctttgaaccttatctcccccggacacattttcactgtgacaaccacaaacccagtgactcatccacttccatcggaggagttattgaaaatgcaatggatcctgagtcgcatcgctagtagctggtgaagacgaggacagcgaccttgactccgatgatgattccgtcgcttttacttcccgctcgagatctccgaacccactgagcaattgaagctcagagcaaggagctcgtatactctctgagaacatgcctttcattaaagccactagttagttaccgagtatgttgactaagagctttcctcgttccatcgcccaagttgaaagtatggctagataacgcatttctcacgtcaatatcggtcatccaccaagactgtggtctttagaactactcctgttgaaggagaaaggaaaagtggagtgagagtgagagtgaagtgaaagtgagagagaaacgagagatgtctagttagagcgaaatagcagtccacaaaacacggttgtttatgagcccggtgcattaggtctaccttaataatatgcgaaagatgacagtaaaaaacgtgatggtaagattggaagagctagtatttcaagagaagctacacgaatgagcttgcgttggctttaccggaaaggctactagtcaatagcaccgcatagaggtccaagctcgtggctattggatcttctgcccagggatatgacacatctccaggtggcaacagatatctcttgcattacgaaacgctgacctgaaacttgtatcctccaggcaaactttcaccgtgacaaccacagacccagtgactcgtccacttccaacagaggaatggttggaaatttaggacagcgactttgactcctacgataataccgtagccgttacttctggctcaatatctccaaccaaggaggcactaacatgacttgcttcggggaacgaccgacctttgcaccctctcgatgaaacacaactgaccaaaacatggctaaaccagatgccgatcgtgaggcaatgccacccgctcaaatttcccctggacaattgaacctcgggtctccaataggatccccgagcaagggacccctgctgctctgtccatatcctccttacaactttcaactgcggcgctataggtctaattttgccctccttggcgctatgctaggactccaccgccgcggaatggacgaccaccgtaaactcggtcagatggccgtgaagaagcatgggacgtttgtctcctctccacccgcccgaccgaaactcaaatcggccgtcgtaagaagaccctaaaacccgcgcctctgaagcaccgacgccgtacctctgactcgcaatgatatgtcccctttcccttttgctgttttgcactcgttttctgctctggtccgtctgaacccgcatatccacctatttggtatttggcacttgagcttgtacaacttatgctgtgagacgggatctagttgaaaatataaaaagagcctctagtcccaattttctattctatcttattcgcagtatttattagtagtgtaaataattgacttatttatatgcacctgtatttctatgattctgtgaaactcctccgtcgtgacaaggacatcggattcttcttgtgccaggactctatcgtacagagtatggaattgtaagacaagaagatctccggcaattgcttgctgtgcgatgttgatttcctgggcacaatatggctgctggaaagtaggaatctgagggtatagcagcctgcttatttgatgcgactgctttgtatgtcaattgtcagcttgttatcatattgtcacggaggcacttgctgatgcacgatgtacttacagattccaggtatatcacccctctggagcacgcttgtaagttgccgcaggacttcgatatctgagacccaaagagggaaaaagcttgaacgcgggatttcagcgagactgaggtcctggcatatcaactccttaatgagcttcttcttctcctcctcttcaaactcggaaaactgttcttatcatcacctccatattgaaaaggataccaagtgatcttcctgaaacggatgaaaagggaaagtggagaatagcgggtcttgcctcagccttcacgtctgcctgaggcatccgccccacaaaaaccgttgcctggattcgaccacggacatgatctcctacttaacccgacgcccaacctatcagcgcatatggttgtgtagttagttctttgttttcgtgctatttgggctctcagccctcttatactcaacaaatagaactctgttgatcatgttctggatatccgtagggacaatgttggcacgagcccgcgagggttcacgtatggttctctttcgataccatagtcctcttgcagggggagatcagagcgcagaatctgagtccatgaatggtcgattctatcctcttttcatcggccagaatgaaaagattgccaagtgatcttggcgaaactgttgggagctgaaggagtggagaagagcgggtctctggctactacctgcttcgggcagggccagaacagccgatgtttctcgtatgttgtatggacttttagatatcttctttcgggtattcggaattagccgtaaaataaaacggggagaaaacagtggatggggattggcttataattcggtcctcttatcactccgagagcttgacgcttgtaatgtatataaagtaatagagaagtgagagtgagagtaagagtgaagtaagagtgaagtaagagtgagagtgagagtgagagaggaaagagggatgtacttagacgaaatgcagtccataaaacacggttgttcgtgagcccggtgcgttaggtccacctccgatataactgggaataccagtgcagcattcaggcctcggcctcatcgaccgataccgtatcttatacggagtacagccaatcataacttactcggccgtacagcgcggaatgtcacagatcataagatccaaccctaaccctatcactcgactacaggatacaacagttcatcgacgaaagcagcattggtatattgtaatttcaagaaaatagacaaaggaaatagttgatagcattagatattattacaaccctttagctggcccaacaatagtcgtagagacttggtatgacgcatagtgtgagcgcccatcttgcgactgatcattcaacgacaatccatccgccgaccctggtatttgatccagtcgcgtgagggggaattcactatcctcctcatccatgccatgcccccgttttactgtactgttcttgctcaggctggtaggtcctcctgtgaacggttgcgacgagtatccatcatgactgccaaacaaggacgggaaagcagccttgagaattggacggagcatgggcgcgcaggcatttccaatggcaagagcaggctctgtaacactccagaaggcagcccagatcatcgagtaagacagatcggtgaaatcaaccgtggtgaggacacggatacggatgatggtgatggaggaaatactatgatactcgttagaactttgctttgcgatggcgaacctggggggaggagaaagcttacaaggcacccaatccaaagatcccaaccaatcccatcttagtcgcaaccgacatattcaggttccagacaaagcgaactggcaacgccacgatgatcatatcggtgatcaggttaaaggctccaatcgtcgaaaatgccacgttctgattcgcgcagtggcccggcagagtaggattccagttcctcgcaaagggtgtgcagatcaagaaaacctgcagcatactcccaacccagtatgcggccgaaaagcctatacaggtccacgtcaggatgcggaattccctggacacaaagatccgcaagtagaaggctaggtaggagaacttcgccaggaccatggcattgtagtagacgatctggtagaccatgagcatcttagcgatcactacagcattctctgagggaatctccgtgatgtggtatcgcatccccacccgagcgtagtggtactgcattgcgagcatgccatatgtgtggaatagtcctgcaacgcagaatgcatcatcccatcctgcaccggtttttcggagtcggcgggagacaccacgcaatatcacgagtagggttgcgattgcgacgaggaccgtgttagcgatgagctgatcgcgcacgatggggaagccaaagacattgtataactgcattttcccattaactcatccgttttcggtttttggtgtgctgtacaacatgtacacttggggcatatatggttgcaaagggtgaaggatctttaagagccgtgaagaactgtcagtcgccgggtaacagcaacattgtctccgtcaattgtacaaagtactatgcactacggtttcaaactagccactcattggcctgtcaaggtgatcagcaggagattatggagccgttatggcgggccgttttattttaacccaaattaatttcccagagtggacttgcagagagaataaagtggctgtcattggaacgaatgtcaacctagttagggccaagccaaacttgtaaagactatttctcctattatgtccatgggcttcggctattaacaaataacggcctcggtacactccacccccgtacacctccttgtttctaggggcactaacttcactgaggtaaataacgtcgggaacaatttacggagtatgagctagtaacagccaccaagccgacgggatacgaaaccctagaaatgccgcgtggacttttttatctgctggcagtcgattgtccgactctcgatcttaaatatttctattattgtcatttcccctccatactggaaaaagattcaagtttttttaactagttacttacaacatggatgactacgactatatcatcatcggcgctggaatcggcggtcttgttctggcaaaccgtctaagcgaggatccctccgtcagtgtcctgctcattgaagctggcgccaatcggatgggagatccgcgtattgatacgcctggattgatggctaccatgtatggtaacccggactttgactgggattacatgagtattccgcaggtatgcccgtcttaaacatcgccttctcggatgaaaacctgattaatgaaaaggtccatgtgaaaaaccgacagatcggtcagccccgcggtcgggtcgtcggcggctcttccgcattgaacttttccgctattgtgtaccctgccgcgtcgaattttgacgcgtggaaggcgctaggaaatgacggttggagtgccaaggatatggccccctatcttcgaaagttccactcgtatgtcgcccctagcgaggccactgccgaactactcggcacaagccggtacatgcaactcgagaaccaaggatcgaatggtcctcttcctgtaacttacccagatatatatgggccattccacaaggcctggaatgagacatttgcgcaattgggctgggaaaccgatgccgaccctattgatggccacaaactcggcgcttttacttccccgataagcgtcgatgtcaagacgggtaaaagagggtatgcagcggcatactactcccccgaggtcgcggcgcggccaaacctacggcttcttgcagagacaatggtcgagcgaattatcctctcccaacaggagggagatgtcgttgccactggtgtgcaggtcaagactcaggacagttcatacgagatcaaggcaaagaaggaagtgatcgtctgcgcaggcagcctgaattcccctcaggtgctcgagctctcgggtatcggcggtgcagatcttctccagacccacggcatcccggtgatcatcgacaaccccgccgtgggcgagaatcttcaagatcacagtatcgcgagcgtcaactttgagatcgccgatggccagatctcgggcgatatcatgcgtgatcccaacgtcgtacaggcagtcatgaagctctacgaggagacgcgcggaggcccgctaaccggcatacctctcaacatggcctatctcccgctagtagatggaaccggcgtcgtgccgaaagaagaactcgacgccctgctctcgaaatacctcgacaacgacagcacaccagctagcctgcaagcgcaatattctcaaatccgcagtatactcctcgaccggaacgagaactccacgcactacctcttcctccctgcccagctcaacgggaaaccagaccaaacaaccatcaccgacgtgctggccaaagttcacccggagaactacatttccatcatggtgctgcacaaccacccgttctcacgcggctcggtccacattgcctccggcaagagtgaagataagcccacctacgacccaaacctgctctctcacccgcttgatctggagatcatggcccggcaggtgcagtacatggggcgcgtttccgagactgctccactctctggtctgctcaaatccggcaagcgcatgcctcagagtgccatcgatttgagtgatctggaccatgtgaaggatgtcgttcaggatctcttgttcacgtgtttccatcctgtgggctcgtgtgccatgctgccgagggagcttggcggcgttgttgattctgagctcagggtttatggcaccaagaacgtgagggttgttgatgccagtattttcccgcttgagatcgctggaaatatccaggctactgtttatgcggttgcggagcacgcagcggatttgatcaaatcccagtagtcgggtttggggctttagattgcgtgacaactagatatgggacattacctctagttgtagatacctcctgataggacatgttcattctgcagattgtatctaggcaaatggagactatggttttacagcgcgaaagtctaaatgtttaacaacaagctaaggttacgaggccgaatgcgggtgggctcagtacctctgtactgagtgttactaagtatggatgattgattggttaaagaactaatgatagcgacagaaactggggttgcacaacccctccgaggtttctccgctgcatggcagaaggttttcacggttaggctcggtcggctcgggccggttactcgatcgataatctaaattagacagacaggtccagaaattgggggcgggatcagaggacccattttcggacatagactcaggtgactttgatattgtgaaaaactatgaacgagcagttttataggatgttcttcaagccactctcgggtttagtttcatccactctcccgatactaatcgacacttatcgacgcactggatgaatgtgattcggatgatgatatgcaactcatactctgattcacagctacaagatttagaggctctgcatgtgcgtgtgttattttcttgtccaggcctaaatcgccaattctccaagaactatcaacgatccccaatgaatacgaaggatcctttttgagattcccaaagcagtgatgacaacatcagagaatcaagtgtctaatggcaactatctcattccatagttgtctcccaacctttttcaggtataacatcaacccaataagcatatatttgttcttagagcaccgactttttgctgtgtggatggaccccccaccccttgcctaccgattggtttgggaacgctaattttcaatagctaactagtgtgtccgtgcgatcgtccgtgtgattgcttaaatttgttgctacataccacataccgtatacttgaagatctctattgagacctaaagcatagcctcgatgaggtatcgacacgtagaaatgatacatctaatgtaccttcctgtgctcgagaggttatcggcaaatgaggcgggacacagctaaaagcaaatggctcatcaattttagcaggtgatccaatcgtggtactaagacccattcatctcgcttgtaaaccttattttattggcctccctcggagtcttgtcaatctcagactaatctcactacatttgggtcaagtgatcagaatttgccggtctttttgatccaaaaacgcactcaatagaatctactctatcagactctgatcctgcctctatcgtattatcattggagaactacatgggcttttctgcagtatggcaataagataacctcatacattcggccgttaagatatagctcatgcgacatttatctggttgttcctttctttccttgcccatctatgtatatcctctatctctcggacactgatgtagacttattgactcgcatatcattttcccctgctatataagctcttccacgcttccttctgcgctttcttcttctttcgcgaatttctccctttccttttttccaacataaattatccgtacaggtgccctctgatgtttatttttggttatttggctactcggacagcctttactagccagcacgaacactatactcgaaggctggcaattcgatgacaaccccgatcaacatggtagatatgcttctctagaatcctcgcctgcaactgagccattctctctgtcgacgtcgtaccacgcagctatagtgtagtttgagaaataccgttaagatctttccatggccgagaaccgtgctttgtccctggtggcatggttacttgctctggtttccatgatgaagaccgatcgaagttcgatgtcctgtagggtatttacagttgtcacattctctggccgatgttcaatattgtgatgcgcgcgcttatgtgctgtccatagcccaatgatatggtgggttttgagggcgtgttgctagcatatatattctctctcacattggtagggactgtggggaaactcaaaatccacaaatgaattcccctacatgtatgatttggagtataataaattgaaatgaatatttattgatactaagatattcgacctgtaatgtaaaggaaaaaaataagtaaaaaaaagtaaaaaagaagtgataagagtgggattcgaacccacgcctcttgcgagaccaggaaactattgctagttatggagtcaaggtataccttaacctggcgccttagaccaactcggccatcttaccaatcgatgtaaggtcgacaaatatatgcctatatgaacggaaaataagacagatgtggatagtaccagagccagttgcttcaactgtctaacaatccgaagtcgatcgaaaatgaaaacttttttttatcagtctgggcttcgtgcccgaatattaaatctcgagtgccctttaagacttgccgtgggaatggctgtagagacacctagctcaataattatccacatttactctacaaagtttttttaggtagtatacatatagaaatcaagaaaacaccgcacgacaaattgttggagtgaagtatctgagattggttcacaaccaccttctcctttcaagttccagatcaaacgaaaagtggcaactccaggccggatttcctcgggtggggctttcctatttcagctgtgaactcatcaagtggcatgggcatatcgaactgtacttttcagtccgcctgacctttcatttaatcttctccgtacagggaaaccccatgccatggcttctcttgaccttgaaaaatctaccgggagcataacaaatgcccgaaaggggccagtgcatcggcagaggaatgttctcggcccccgagatcggaagcggacagctctgacgcaaggcgctttttattattagcacggccacaactttccatggctgggaacagactggtccactcccaaaagcaaactaatcagctgccacaggattcttccatatggctctttgcagtcacaggaaggtgggcacccttcaggggtggcggtttgaggccacatgatgtaatattcgcccagggcattttccaggatcagcggtcaaaaccagcggtgaccctctcaatctgatattcagccccaaacatttctttttttctcaagctccctcttccttcactccctctaatcacaatggcacctctaaagctcaacatcaagcacctggagcaaattgcgcaggcaggcaatgggccaatccaaatcccaaagcaccgtttccgcaacagctctgttaaagagggaatcgtccacgttggtgtgggtggcttccacagagctcacctggctgtctatgtcgaccagttgatggagaagcatggtgttaccgactacgcaatctgcggtgttggcttgcaacctttcgatgctaccatgcgcgatgtcctgagagagcaggaccacctctacaccgtcatggagcgctctgacaagggaagctttgcccacgttgttggatgcatcaattcctacctcttcgcccccgacgatcgcgaagctgtcatcgccaagatggcccaccctgatacccatattgtttcgctcaccatcaccgagagcggctactactataacgaaaactcccacgagctgctgagcaatcaccccgatatccagttcgacatcaagtccggcaacgagaacgccccgcgcacaaccttcggcttcctctacgcggccctcgcacgacgctacgaacaaggactcaagcccttcaccgtcatgtcctgcgataacatgcagaagaacggctccatcacacgcaacatgctcgtgtcctttgcgcgtttgcgcaaccctaagatcgcggagtggatttccgagaagggcgccttccccaacgccatggtcgaccgcatcacacctcagacatcagccaaggacaaggaggaactcgcggaggactttggaattcaggacgcatggcccgtcgtcacagagccctttatgcaatgggttatcgaggaccagttctgcgacggccgtccagaattcgagaaggttggtgtccaggttgtcaagaacgtccacgacgtcgagcagtttgagatgcacaagctccgtctgctcaacggcagccactcggccatcggctacccaggccagatggcaggctttgaatacgtccacgaagtcatgaagaacccgaacatgcgccagttggtgtgggagatgatgcaagaggaggtgaagcccctcttgccggatattcctggcgtcagcattgacgagtattgcaagacgctcatgaagcgtttctccaactccaaaattaaggatcagctgccccgcatctgcctcaatgcctctggcaagatcccgcagttcatcatgccgtcgattgccgaggcgattcgggagagcgacaagaagcagatcgaatatcctttccgccgcctgtgtttcgtcgcggcctcttggttcctttatgtcaaaggtgtcgatgaccacggcaagaagttcgaggttgatgaccccatgcgcgaagagctccaggctgctgctgaggccggccatggcggccccgaccagctgctcaacatcaagattctcttcggtgacgacttgcgcggatgcaagaggttcacggatgagatgaagaaggccatgacagacatcgcggacaagggtgtcttggaaaccctcaaggtctacttccctgaggacaccaactagtcgctgttggtttgacgaaaaagttacaattgcgtctgcgagcgttgtttttacattttctagcatgctatctaagaaaaaatacacatacagatagatggtagacaagacttgcctactactccgtatgtacttgtatattgaacggatttctttaattaggatgagttgttttctggattaatttggagaaacgtgcgaatttcggtggcgggtgatatagccagatctaaccaatgtgaatcttaatgttattacatccgatataaagagctcgggagcaactttccaggccttgtaggtggagtagaccgatggtcccgtgggtcagatgagcgtgctcaattttacattgaaaagagaagtggacacctgtaaaaaaggaaagtgacgacgtggtaaaaactggagcatatcatgcgcaggccaatgatggttcattcatgagctatcagaatgaactcagtgacaacatgaaatcattacattcatgtagccaatcaagaagtcgattgttatcgcgattaattgactggaagagctatatatattggaggctctcggaaaatctatacttattggtgtctggtacaaaatataagctacaggaagatttgttcaaatattcaacaatgggattttgaagtatccgggataatagaacacccgctagcagtttaaaaaaggagtatgtatgaacaatgttacaaaaaaagccaacctcataaatccaacacataggtgaatataaggcagcgagtacaacgaaagacaaatccaaatcatgaatacgcaaactcaagtttacagcataaccatgaagataccagaggcaacggcagcgaccgcataggcaccggcctgccaggcaccaatgtgcacagcatggggaacggtgccagcagcaataccagaggaggtagcaccactagtagaagagccagaagagccagagccagaagcaccagcagcagtgctagcagcgagaccagcactgacggcgccagtaccagccgagccagcagagctcatctgagtagcgcaggagccagaggcagaggtagacttcttggtgctagcgacaccgttgaagccacaagcgtcgctaccagccttggccttgttcttctggtagtaaacgttcatagcccaagccagctgctgcttaggcgagcacatggagtaggcaccgtaagtgccagaagtggagttggactggactccgtccatgacaccgctctcgccgccgaggtagccgaaggtggttccgatctgcttgtcggtgatgtcggagttggggacacactcgagggagttgtacatgcactcgcagaggtctgcgttgggcgaggggggcagcttgctggcggcgttccagtccgagccgatggtgggacagctgcgaccgacggtcgtggagacggagtacttgtcggagttcacgccggtcggggtggcagaggccatttgcttggagaggtagctgaagtctgagagggtcgatacgtcgtcgccggagacggtgacgaggccgtacttgttggcttcttcgtagtacatgtagacgatgccgccggaccagacgtcggtcatctggtcgccgaacaggacggggacgtcggtgaacttgcgagggcggacttcgttgcagccgtactcggagaagaaggcggggacggggtagtcggcgaattccttggtgcgatcggcgtagccggacttctggtagctggagtcgccgcaccactcgtagatgttgtagccgaagaagtcgatggagtcggcagcttcgtcacagacgaggtagttggtgatgtcttcacggacggtggcatcgtcgtcggtggcgtagccaacgccgagggagctacggtagttcttttgcttgatgtaggacttcatgtcacggacggcggccttgacgtaggccatggaattggtgttgttgaccttgttggagacttcgtttccggcaaagaagccaatgacattggggtacttggcgaaggcatcaacaacctgggagtagcgagtgaagagatccgagttccaggtcgggtcgtcggattggatggattcgctaggcgaggacagatcggtgatcaaatagataccggcatcggcgagggcagtcatacactcatcgtggtctttgctggggtcgacagcgtatgtacggacaacgttggtgcgcaattggacgaggtagggaatatcacgcttgcaggtgtcgatggccagcgggtcggtgtaggtatcggtgctgtcagcaccgttgcgacccgtgaagttgggctggtaagcgacaccacggatgaagaactcggtgccgttgttggagtagaagaatttcttgcccttgatctcaatcgagggaacatcggccgccatggccgctcccagaagggagagaccagcgatgatagaggccttcattgcgcaaaggaaatcgaaatcctaaggaatgtcagacggggtacacaccgtctttcgagatagcgaatgtaaataagtgaaagaaagaaagaatcagaaatctacaagatatgtaggaagggaggagaagaaaagagagaccctggaagggggaagagggtctaaagggggacgcgaatttatgtggagatatccagtgcatatcatttgtacaacgctgtattgatttctatttataccggatttttggtttttggtaactccagtggcagacgtgattggcaatccagagacaaacaaaccttggaagtggaagatgttgatatttcgtcattggccccttctactccctgcctccgctgtccctgcactgtgtctccactgggactccactgtcaccccactatttcctcggttaagcctttcccgttgagtccttttgcttatttgccacttcccctgagacatgtggaggcgctagtgagcccgtggacgggctgatgctgcgctaaagaccctgggaagaccctgactggaggacagtgtgggacttcattttctggtaatctattggaaagtcaattgtttacagaatactccatcgttgaacatctacggaatacacagacaatattgtatagaagagagattcaaagaagaaagcttgttcattgccaagggcgatcaatgcaatgacgtcgattggaatgaatccgagcatccttggctaaggcttgaccattgtaatacgtagcacttgaaatcggaaatatcaggattaataaactgtaatccccgtctcaaattggtctagccttggtgatggtagagtacatgtctctgaaggtacggagtacttctggggcatttcgggctaatatttgtcttgaaacatgtctctaatttatgatacatgctcttggaccggacaatactataatttaccattgtacagcagctaaacatcttatgttatgtatatgatacaattgagtaacattctattgtttcatattaactagggccaaaccatctatatcataacattcgatgttttctttttctttttctctatacttttactatacaataacagtagagagatgcttgtataaaaaataccatgtatccccatacttatacccaacaagccaatgcccgggaaatttgtccagaaaatgtctcggactgataatgaagcaaagagcccaccgagactccatactaagcgggatattaggccgccacaaagcttggtaaagtaaaatatgcactctgtactccatatatgccccgaaagggagatgattgactttctcgtagcccgtacctacggagttatatgcttggacccgcttttggcgtgatctatgatattcaggggtgcatatacccctgaaatgcactgcctggttctgtctcgaaccgcatggtttgcgttgcgctgcatgttgggtcatttcataaatatcctagttgataatcatccccatgtagaagagggctgtgctaacctaacgggaggaaatattactgcctgctgtgccgtcaggcaaaattctctcattcttacattgaaaagccaacttaaataatcatttcctcatccctgcgctaggcagacagaaaaaaaaagctcaactagcagcagaaaagaagggttctcgtcaatggcatcctgaatgttgatggagggattcgtggcgttttagatgataggaccgattgtctcgcagagggattagttgaaccacttgaccgtaacggcgatgcccttgcagcaccatatatgccatattattggcaatggttgcccagccatcccggcaaactgtatatgcggcaacagaccatttgccagcattgcttagccgaacagtgcctatctgttaggacaccccacacgataactattccaaaatattgttagtaggggacgcttggtacgttatatctcgacttccaagagattacatacgtatatgtatataaatgttggtccatggcagctggttgaccttctgacgaaaacccagtggacccaaaccctcttcaggcccaaggggaggcttcttaatgaaatcttatagtcggatcgtgtcgatatcgggcgaatttgagagtttatgaagtcggcccttctagcttttccaagcctttggatattcgccaacggttgcattttgagtctttatgaaaaaagagaggaaagggctggtttctgattgcagggtatgattgctctctaattacatggcatagaaagctcctccatgtgcactacacatattgtttaatccgagttctcatatctgacaagatctgaactctggcagcattacccttcaccgatacagtctcaaccgtggctccatagtcattcaacactgtcctccacgcattatgaagaaacgggcttcaaggccaactaccgtcatgccataaacagagctattttgggctcgcagtcccccataaagcagtagatgagtgttcgcaatgagggaaaaaagactgttggtccaagtagaagatgaaaatcccgaacttttgactttcatcactattagtgttggccgacagttcaaattggacacaactttgttgagcataccagttcaatatgtaccggacaccgataacgcaccccacactacagcaaaaggcgctgagagatagacgtcattcctcaagtccagaatacttttctttgcaggtcggtatgctcgggcagtactgtggcaaagctcacatccccacaatctctaacggttgacgaaggtatctggccaagagaagaagtgtgatcaaccagaaagatgatgatatgaagtggatggaagatgacgatctagctattccatgaagctctttatatagctccatagtgtatctgatccatttggttaaacaatgtcaaagtccgacgtagaaccgagagaacctgaaagtcacatggcccaaaatggctagcgcgaggtaggcagcaactattttaagggcccttaagatgccgagaacccatagggctgaacttttctcttttctgagaatttgtatgttgtacttactccgtacagacgacggcattatcatttgattcgaggttgacttcattgactccccttttactctgactttgcttctcactctccctcgcttcacttcagcaaccgcccgaccgcagagcttacagcacagacaccaaccaacaaactgaaaaggtgacagccaactacgtcgcaacgcagctgattgagctgagtggtcatggatattccctcgggatgacgacagccataacttttgagacgagcccaagccgccaacatccgcagtacctgcccgagcagggcctagttgatcattgatcacggcctcatcacgaagaggctgcctataacaaatgccaatatagacactgcctaatgatagtattacaatctattcttgggagcgtacctcctctcagagtatctccaaggctcccggctgagagcacgggagcctgcccaggtggcgctgctgagcgcttctacgggcaccaaccaacaaccaacaaccccgaaaaccaaaccttgacaaccaacacgtgatcgttccaatatgcgtctggcttgacctcgggacgcaatcaatgacataggaaaaggggttgtggcgtccaggcctgatgtggaatcaacacgcgagctgattgaccaaacactgccaagagcgggtcaaaaccccctacacaatttatgctggagggaatttcccccaataaacaggagacccatatctgccgctttctgtgccacgatcgtaccgctactttgtatatcgtctaccaacatctgcaggaatgcccgagaaaatttatcagatgcagtgtgaccatggtatttgactgcagaatgccggcgatcaaccaagtttttgccaagtcacccaagcacaaagcttccaccgacaaagctttcagttccacctggccaaggtttcaagtggcgctgtagtttttgactgccagcgcaccaacatccatgatttgacgatatctgacgcagtcgtgcgcaacaagaatttataaagtggaattgaaacactgactggtccccaactaccaactatccatacaaaccaatctcgcgatccgagtttgtttttttctagacgccaagatcacaatatttgctccactatacacactatacgcaccacttgtggctgtgcctttcaactcttttcgaagtctgttctccaaagaaaccccagcaaattgctacagacaaattctatcccttcatttctgagtcactccttttacccttcttctcgctgtaatcgtttcataattgtcattcgtttgatctttgttgacttcccgcctaccccttgcctgagcgcgactctcaccgttgcgactctcaccgttcccctgtgcgcgtgaatatcccggatccgccattcatcatcgtgctgtggctgtatcttgagacacgtccacatttcgcgcttagattgccgtaatcgcttcagcttgtggatttgttgagctgtccatatctcgaaaccgttagccagtgcgtgttcccccagccagcccttcataggcatccgtcacaggtcgcaggtccaagccacagttgtggggtgttttccccttgaggcaaattcaagctcatcaagctcatcattagcctctgctctgttctcttatatatatctctcgcaaggccactcttacttacgaatccatttctctacagaagccatattaagccaccaccatcatgcgtaagtccaacagctatgcatacccaatctatcaactggccagccatactaaacgtaccactagtcaaaattcgcagtaaagcccacttcgcagcacgttacggtcagaaaagagccagccgatcgaactctttgcagctcgaggatggactatcccattcccagaccttgggcgaactctcagcagaccagcaacgccgacgggaactcaacgacggcattagcgtcccagagtactccaacacattcccgccggagttcgctggtagcgaccatgaaacacacaagtccccgcctgaaccgtccatggctagccaggacccaatcaatgtctcatcgtcacgcgggcttgataccgagaccgttggatcggcgcaggcgcgccagcggaaaagtggaatcttgggcaagttcaagcatcgccatgatgacgacgagtgggaggacaagaagtcggagcatcagacctacacttttgcgtcacagataagggctactcttttgaactcgtgggtcaatgttcttttgattgccgcacctgttggaagtatgtcttgctcctgccactgatgtatggaagtgcacgtgctaattctgttcttgcgcatagttattctctatgctgttaaagccaattcgattgcagttttcgtggttaacttcatcgctatcatgtgagtggttatgccgctggctaggacgaggatatcttgctaacaggcatttactagccctcttgctgccatgctcagtttcgcaactgaagaaattgcccttcggtatgcttcaatctaccccattctgtttggtctatgctcatctcttctagcacaggtgaaacaatcggtggtctgctgaatgcctcgtttggtaatgccgtcgagctgatcgttgcaattatcgcgctggtccaaggcaaaactctcatcgtgcagacctcgcttatcggaagtatattgtctaacctgctcctggtgctgggcatgtgctttttcttcggtggtatccctcgcatcgagcaaaatttcaacgtcacagttgcgcagacagccgcaagtatgctcgcactggctgttagcagtttgatcatccctactgcctaccacaagtggtctgatcgttagtgcatccaggacccgcaaactgagacgagagctaacaagaactttgactatagttgacaaagttgacgggaccgcctctctatctagaggtacgttacttcctgggactactagccctgctatcgctttcacttttgttactcacaccgcaccacaggcaccagcgtcctccttctaatcgtctacggctgctatctcttcttccaactgaagtcacatgccgacatttacaaccaacccagcctgaaggtcgaacggcgacacatgaaagtcggcgaaggtgataccagccggggcattgcccagatcggcaaaatgaccgccacgccgttagtcgcacataatcccgaacaaatgcagatggaggatcccgaagatgaaaccgaggagccgcagctgtccatttcaactgccgtcatcacgctgattatctccactgcgtttgttgctgcctgtgctgagttcatggtatgcatatgcctttcccctagatctgttccgatctttattaagtgtgattgcagtaagctcattaatctatgcaggttgaatccatcgatgctttgacggctaccggtaacattcgcgagacgttcgtcggattaatccttctgcctatcgttggtaatgcggctgagcacgttactgcggtgacagtcgcatgcaaggataagatggatcttgcgattggtgtcgccgtcggatccagcatgcagattgcgctgcttgtgttgccgttgattgttgttctcggatggatcattggtgttgaggatatggtatggagcccaaaatttagatcttatcgggcctggcactaacttcgacagactctcaactttgatggattccaggttattgtactattcatgtctgttcttttggtacgtggatttgattctcaagaaagtgataccgtactgactgttcttgttaggtcaactacctcatcggtgacggcaagtctcactggcttgagggtgtcttgttgatgatgatgtatctgattattgctcttgcgtcttggtatgttcttgttctatatggttgacaagtggaatctgtcgcttactgattgcgtctctaggttcttcgtttaaacacttacactcattacagtcatcgggctgggtccccgttgacgatacgatatattataatttaccatcctaatcgcggggacctttttggttattatcttttctctatcacatttttatttggttttatttggttttatttggctttggattctattatgatcgcccataatatacccactctcgcggtgctttgcatgtccgacgcatttaatttatttccccgagataaaattgatctgtgattccataacagtctttcacaataatccacatcacaaaaatcaaaccaaataaatagccggacaagagctattcaaccgcctacgttgtcaggctaaaaaagcagggctgactaattcggtaacttttccccgaagagtggggatgagcagcgctttcgggactgaatctccgacaaattcagactcagcacacgaaatacgcccgtggacgaataaacagaatgcaattatgccaacagcacagtacggtacggagtatgtcctccgtacatccaggcacgatactgtagccatcggggaattaccgggctgaacaatcatgcacggtaaggctatccaaatccggactcggcagactcggtatccccccgatgtttctaaccgagccgatgtggggaggctgggatttacaattgttcctggcttgttcttcgaacccttcccatttttactgcggagttctccgtacggagggagtacaaagtagtggtcctgggatcccgcatctgcccgggcctggactgaggtttctttcgaagcacctcgccgtaaattaccacatgtggctattatcctaactggtatgtatgttgtatgtatgttgtagagaattccgtatgtcatgatatgatatcgaataatcagtacaaactacctgccgaatcagatggggtcggcaactgctccgcgccgagaagggacagggaggaaaagaggacttgatcccggacggaaattgttgggacgaaatgaaattcaaagccactttggcgctggaggcttcgacactgccgattggattggacggtagtccggcggcacgggatgcctcggataatatgaggaaggttaggagtttcctttattaatcttgtcacctgagaggctactccatatgtggggtagagaacccggatcgtgaaaggactgtgcagaggcagttagggtagggcatgcaatgttaatccagtcctccgtagttactccgttccgtatgtgatggaacatgttcaatttgccttttaggcttccccactgttatccaccggggtacggaggacaatataagaaccaaaggccggaaaaatataggcagatggccattgaccccgagtctctcttgtaaagttactatacaatacaagtccaagtctacgtcactataatatatcgattataaaaaaaagaacagacccaacttcttacctaatacaaagtaaatgcggggttatccggggtccaatggctggcgcctcggaggttgcggtccaatcgcggtatcggacggggccgaaatgtgaccggggggaaaaattcggtgtatgaacttttccgatgtgtgacgttcctgggcatgtgtataacctcggaactacacaattatggatttggcactccgcaagggacgaaaaataaaaacatatgatcgcggatgcagtcggcctcggactgtttgcacttgtacatggatgggaccaaattgtgggagtataaggatggcagcagaaatacggggcaaggactggtcgagtcaggccaattccccatcccgtgaaatatgcgtgttcttccgaggggatggcgattcatttgaccctctgccgagcgacctgatcgcttctccgattcttccactttgtgacgggtgacaagcggggggaaacacaagcccacattgtaggaatgtcacacggaggcgtcgaatacggggtgagaaggtgaaaggtcatagccaacgccaatcaatgcagaggtaactgtacttggaggatctagcatctcacctctttgcggggagagccccgaccaggcacttggagaccgttgattggatgccatttccccttcatccccagattgatgggctgcgtggatggacggccatccatgttctggggacgaggctatacccgagggatccaaatgggccgagatacccctcatgagagagacgagaaaaaccatgtgggagaaaaaaccgccttatgggtccactggtcttctgggcgtcttgtggagtcgcgtttcggcttttcattcttttcccatgaacaattcttggttctcgctgtactctccgagaatggccccccatctgtgcacacacacagactaggtatgtatatccgcttgcctatttaggtgttcccggtgcgggaagagacggtgtatggatttcccgcccagacaaatgccgatcggacatcagctgccacggggtagacctggtcaattgcctaggcagaggcgaatggtacttttgtgctccgtgccctagtatagagttctagggcggccatggaaccagggtgtaccgcattgtacgtatgatgcgcccaaatccaccgatcccccagatttaggcactgtgactgatccctcacgggccctagaaaatgccggaaagtggcggaggagaatcggccggcgagtggacgggtattgtcattccagccagtccgggtgctttggatctggatttggtccggtagaagagacaatgtcctacttgacaggccagattgccaatttttgatttttcttttcttattttcggaccgtgagctgagcccgagtcgggtagagatgtgaaatgacgatcatgagatcagagcctggtaagaatggggtagataccgctcaggcctcaggtgtttcccgtgccgagaaggggtatattagctaaatatggggttataacgagagagatggaattggatatgagttgtaattgtgaatagttaatagctagtgctaaaacaattaaatcgttatatactatgcatctgctatacatgaatcaaatccttctccagaaacgaactacatcggcagccggaaactgggggtctccacctccacgaaaagcgcgtccttgcatgcttttggccctccgcaatttcagcggctctggtttgctcttttctctcggctctgggggtttttttttcttttcacaatttccctttttcccttcttttttttctgctctgacttcatttccccggtcgtgacattccccgttccctcccgacttgtgtttctcccggtccggtgccccgactctttgagtttcccccacactccgccaattccgttcttcttctcccttggccctttccctcttgcgttctcttttcgttcacatcgataggttgtgatatctagtaagttggaaagcgagtcccaccggaaaatgcaatattaactatgatagaaaccgaacgggtctgcgtttaattctccgagattcttcccccgcaaaataacagcgcgtgaccctgatacccgtggtaaatgggagaattgcgattgatacaaatcgcctcgcatatctgcagacttcgggtctgtccaatacaccatgcggtccagcatcgcttgcgctcgatgccggcgcagtaaaatcaagtgtgtcaattccgggatcgatacaacctgccgcgcatgcgaaacgtccgggcgcaagctcgaatgtgtctatccaaccccagcactcggagtgaacaacgccaagcgggatctggctgccctggcagaaggcgacgatcgaagtaacgactgggatggcccgaaacgacatcgttcgcgcaaggtggtgggtatctctggctcctcggctgggtccaagctcggtgtggatgcgcttgattcctcgatcctgacgaccaaagtgtgggaggccgtcttcgacctcttccaatcgcattttgcgactcttctacccttcctacatcccgcgacgtttctcggccagattcgacagctctcatctccccctcctgcgcccttcgatggacaagatccccgcaatcctgcgaataaggtggacccgtcttcctcgttgattccgctgggggtactagccctaactgctcggtttcaccctccgttggctgcagcccactcaccagtgtcgcctagccatccttcgaatccgcttgccgcatcggaatactatgctgcagccctccgcagccggctggccggcttggatggttcttgccttgctcaacctgatcttgcgcgcgtgcaggcgttattgatgttggctttgcacgagtgggggatgtgccgaggcaagagtgcttgggtctacgtgggcatggccatccggcttgcacaggccatgggtctaccctttgaacttgaaaatgaattcccagcgcgagatctttcgcgctcctcccccggcttgcgaaccgaggcagatcacttcggcctgccgcggcgtgtagagcccagagagccgacctcggatgatattattgcacaagagactaagcgccggacattctgggcttgctttatccttgaccggtgtcttagcagtggaaagtaccggcctcggatggtccgtgtcaaggaactcggaattcagctcccgagcgacaacgcatttgccttcggcgagcgggttcggacggccagactcaatgaacccaccgttcggcgcccgcagagtttcggttcccaaagcatgcaaatccccagcatccgtcaaagcataggaggctttggcgatgaaaaactcccatccaatggaacctcagataacaagtcctggtcacctatctctcgccgcaaggagtcgagcgtggaggatgttgatcgatgggaggttggcgcagaggagtcggtactcagccgggtgattcggatcattcgtgtctggggaagcatcgctaaatggtcttgcgctggcggtcgacgcacagagcaatatcccccatggcatcctgaatcccgcttctcttcactccgtctgcagttgaacgagttccaggatagtctttcccgcaacctacaatattcccagcgaaataccgacacacatatcatgtacaagaccacgctggcttcatataccgtgatgcatgttgtctacttcctatcggtaattgtccttcaccgtgcctatattccattcctgcctatccgctgcaatgagccttctggccccttagatgagccgttgttcgctgtcgacaaggtcaatggcccacctgagggtttctggcgggacagcgctcgtgagctcttcaaggcagcgcggcagatgatcgatcttgtggccacctgccaagcccgtggtgctcttgttgagaaccctttggtcggatttgctatctacaatgccgcttttatcggtgtttatggaacacatttcccacatatggatccagaggggctgatgggaactaagccaccccctgcgagccatgatagccaccagcttggtgtcacacaagcacgcaaggccttggatatcatccgagagatgcggcctcgtctgaagatggcgaccggctggtttcgcaccctgaatcgccttcacagctacttttccaaagtcaagcgcgatttccgccgggtttcacgaaatcgtctagatagcatgtcggatgcttctgaccacggtcccaatgggattcggctagttcgcgaaggtggtgctggtggcggctttgaggaatttaagatgcttgaaaagcttttcctcgactttggaagcattgaggaccagttgacagagtctgggatggatgaagactgcatcgcagtgcccgcagcaagcgagtccatctacgagcgcacgaatatgagtgatgctggaagcaatgccgtcaggagcgaaaccggtgatcccggtgaccagatgctcgacggtaccggtcgtcgcgaggtcaacagccccggtctatctctacctgggcaccaaggcgatcgccgtcccagcctaccacttcccaacagccgccaaatgccatccgggtccccttactcccttccatcccttcagcaacatcacccagacggtcccctgtacaccatctcatctcccaactacccctctctgtcagcaaccacgcagtcaccctcccagtacctgacggcaacaagcaaccgcctgaatcccatcaactcctggctcccagcccgcccgcaggttcctcccccgccatactcccaatctctccctcccatcaacgcagccgcctcacacaccatccctgtccttcccccaccgggatccgtcactcaattagccccctcgccgcctctgacctcaacggaatacccagactcaagcctgctatccacgagtgtcggtggagacgacgtcatcgccttcctggatgggtgcgaatggagtcagctatccatgctggcgccttctgagatcggtattcccgccggttggcttagcacgatctggtccccactcagccgctaggtcctcattcagccgctagagttcccacctctccagcaggcacgcatcgaagcagtggcaccaatcgccttgcttcattgtattattactctttacgaattccctcgtccgttacgtcttacgtactgtacgatcatttctgtctctctctcctttatctatgatcgctggcgactcaaaaaatgagacatatcctgcgggaaatcccccgagtgccgaaagcaggcgaattaaactccaaatccaatcatttcctttcctggtctggcctcctcatttactggcccagactcggaatttgaaacgggatcacgaagattgattatcacctatacccagtgcgcgcgaccttgtctttttctatttttgttcatgttcatgttcatgttcttgatattgttcacttgctacctgtcctttctttttctttgggatacgctgttcaacatgcgtgcaaggcgttcctcgtgatttcccgccaaggtggccgtgaaacccgagttgattgttcatttatcggcaatgtttatctccatattggtctttgtccgtttgtttcgagcgaaatttggggtggcacgggagcctggcagcggtggccggcttttttgacttttgttttttttttttttttttctcctgtgtcggttttacgtttttacgatagcctaggcgttgcatttgtcttgcaaactgcaattctcttgggtcaatttatctgcctctgtggctgttttttatccggcattcacttcttcccagcgtagggatagataatatctctcatagaagtacgggtggaaaatagtcatatatacctgcaccatacctataatttttacacgtgagatcttctctgacggttctaataccatccatccaccaatacctcacaccttgaatgctttcaatctatatataataaagcaaaaacaaaaaacatacaacagtgaggattcgctggtggtcacccacccaactactaactcaccggcgnnnnnnnnnnnnnnnnnnnnnnnnnnnnnnnnnnnnnnnnnnnnnnnnnnnnnnnnnnnnnnnnnnnnnnnnnnnnnnnnnnnnnnnnnnnnnnnnnnnnnnnnnnnnnnnnnnnnnnnnnnnnnnnnnnnnnnnnnnnnnnnnnnnnnnnnnnnnnnnnnnnnnnnnnnnnnnnnnnnnnnnnnnnnnnnnnnnnnnnnnnnnnnnnnnnnnnnnnnnnnnnnnnnnnnnnnnnnnnnnnnnnnnnnnnnnnnnnnnnnnnnnnnnnnnnnnnnnnnnnnnnnnnnnnnnnnnnnnnnnnnnnnnnnnnnnnnnnnnnnnnnnnnnnnnnnnnnnnnnnnnnnnnnnnnnnnnnnnnnnnnnnnnnnnnngcgctagaggggaacataaagcagctgagaattatagactacagctgggacaagatagtttatatctcatcgtgaccactaggtcatgtgacctatacgcctagatggtcatagcgctagatatttgttggacatggtggtcacctgaccatcagcccggtgcggcaggcaccaacccccataactagatagttgggcattctgccctttaggaattgacaactgtgatacccctaggtatggaacgcctaagggaatgctatatctaatggaggattgggaaatagagaccgtagtatatatagtagtatgtttagaactaatagctacttcttctaagaagtagtattaaaagtacacgcagtaagagtaatagagctaatatctccgtttcgaagagcctagatagctaataaaagcctaccctcttgctgttctaatttgctagcggattgagagcgaattggtggcatggtgggtggttgaactaactaggtgctaattcatggacgcgttttgggtaatccgcttattgtacatatttttccttggatagtagggtgtaccaaaagcgggctttgactgtactagtaatcgagtaatataaccttggtgtgtaccctttcagtctagcggcattgttgctctgcaattcttactcttgaaattctcatgaaacttccaacaatctggccaactctcttgtttcttcatcagctatgcccgattccaatttattcagcaacactggcctcccggaaagatttgtcttgacgaaacttcaagtccccggagagcttgatgatgcgcaattgacagaatattttcaaccattgcttcacacccctggccacaatcgctctatgtggggaatgattcaagataaacccaaaactgctctactagcgacttgtaagtagcgctcgggaattctaaagataaagatactgacgtgctcatgaattctcagtgtgggagacaactgatgcaataaaatattttcaagactctccctcagcccagcttctctgggaaactttggcagcaaagaacattataatctttagctcccacgaaaccccttatgttgggaattggtttgaggtcttggattcttcattcattcaattattctgggtctacttccaggctcctgtaaccgacgctcagaggactgaaatttcaaagctgagaggccttcgtccgccagcctcgggcttcagcgtaccgagacatcataggcctcaaacagaaattccgaccaaggcatgggcgacccagccagaaagcaatgcgactcagttgatgctgtggccacacttttggcggaactcggaaaaatccgagtggaggcacggattgacagaggtgttatttggcagtacaattataggcaagcggtccagaattgacgatttcgatgctaggctacaagaggtgggctcagtgaaatggacagaagacttttgctctttccggaggatacgtgcttaacataatttttcgggctttatgaaaaacgttatctaaaatcattctagtctaatatttcagtggcaaaaatgtctttcttttctcgtcccgcttgcttgatatattgtacgcctgatcataccgagcttctactaaactctgtcccacgatccttttcactcaattatagctgaaggagttcacctgcaccagaatggaaactctacctctggtttgtcgaagtccactgagtctgctggaagtaccaatatccaacaccgaaccacacatatgtctcaggatttcgtcgaatcaacgtctggtaatttttatcgtagccgctcgggattctatcgggggtcttgaggtatttttgttgttcggtctatgaatctttatatgattagtaaaattgagtggttgcgaagtttctaaacttacaagtactagtaatatctggagtctgttcgtttccaatcgtgagatggaacagcttatgatagaacgtaccgctctgtgggagaatatctgtgatagaaaggcccttcgcgggttccttgtctctaagcgtttcaccggctttgtcatttgtaaatgcagatggacataatgtgatagaactaggggtcgtttcatgttgggtggctcccagatgactattgctcacagtgcagtaggttttgcctctgtaattaatatcgaagaggtactgccttatgtcatccgactaatacggtacctgattattccgtatactccggccatttttttgcaccgtctaaagtatttcctgataagacggaatattcttaattgatactgggctcaagtggtcactggtagtcgagttgtatttaaagatatcatttctattcacatccttagctacgttagaccgctgtagcttttggagccacttgtcgttgcagaataggtatggaatgttggctgttgtagtctgtctatccaagaagttctttataatttgaaggttcgctattgtcttgtcagtacattgcgttcctttaggccatattgggaaatttactttgaacgagattcattgcgtccgtattatcgggggatatgttgaaataagactagagataatcctttgtaactttattctctgacgcagaaggatttttggcatcgcttagtgcctgaaggcctgtattaaccaaagtcctactctcagacagccattttctaagcggatctgggagctgcgagctatagccgccatctgagtctgtgctttctttgatttgaaagagggagtcaagacttggtaaggcgagcacgatgggtataatatagccctaaactagaactagaaagttgatatgtatcgccttgatcaagcgcctttactcaggcgacgtggtatgaggatgtcggagaagcctaagaaatagaataatttgaacttattctcactacttcgcttatgcagtatatcttatatgaaaataatcgaattatccaaaaattacatatgtatgcctatggtattgttactgagacataatgtcggctctctttcggtaaaaaaaccatcgcagggtatggtgaggcccttctaaggttggttggtcacttatatttgttgaggcgctaagctttaggaataaaaagtcttaatagccttggagattggttttctaccgatgcttaagagatgataagaactgcgacgttcttggcgtaaagatgtgagatatgtggagttgaaccgccagaacattttaactagtggatcttggcgattactgcaatctccggctttctaaagataatacttcacaatagtttgaagaagtcgcaccttactgcataggcactatcagccgtgtacggtgtcatttctgtggtcccacatcgtcggtctactcttggcctttttcaatttaaaatttgaaggcatacagccacaatgtaggggaaattatgcctaaagggctccggtgaagtttgattgaattgattgaacgaaaagagcagctaatgtccaatcagtgggttgtagaatacaatatttgagactcatattattcaatagattcgggatgtggttagtctactctttcaaccatagactatgtttagatgtaacttgcagtatgttgggtgaaatataaagagattgatggtgttgaaattaaaggtatcctacctacaatttcagcgttttctctggacctttccgctagaagtattatttcttcactcttgacaacttactgtcacaaatggcatcgacatctttattattcttcctggctgcccttgctagcatcagcggggtctaggcctcatctgaatgcttcaaatccgtctacaacgagacgatcgccttatttaacagtgtaccttttgcttacagccttgatcttgatacggtaagtcattgtcagaactggtgtaacgaaatccctaagtgtcaggtgtgggtttatgtcgaaaattccggccattgtgacctttatcgtactgggccattaagtctttcggataatagcggcttcactttcggtggatgtgaacctgccaatgtaactcgacctgttgttactaccatagaccgagctttgattcctacgcttagtagcactcctgtggaatcaggagacaatttctcggtatggatctaaatcctttatggcgttagtatttcatgttcctagctaaccgtctgttccttgtagacccatgtaaggcgcgaagtgggtcagcactgacataaccgctaccaccgataagggtctaatgcgtgagatggtggaagagcctgagaaagtattttgaaatcatgtttagagttaaaataaatatagcgattggtcaattttatgataggcttagggaagacttctctctgttgtattattagtaaatactaaactgcgtttgtctactcaattgcgttcatggtagacagataagttagacctaggacgcggggcaaagatgctggtaagccgaatataacgcggagcacaaaatgccgagtaattctgaacctatctctatccttcaatcccacgcgaggttaataaagccactgtgctactaaatggcagcctaggtggcagcgctagtgtttagtgtgataaaaatttccagggtcagggtccaagacgctaattttcggatgcggcgggtcctcgggatacgctgtgaaagagatagcagattttccaagtggtctgtgtaggtactagattagctagtgataatttctttagcgttgaaaatattcaaaggatttagtctggtgggaatcagttcgctatatcccgaaaacgagaagtctgtatctggtagtaactgcgctcagtgcgccacaataaagtagatgacctaccctgcgccgattttgcgaaggtgattgggcattctagttcccgaatcgagatacctgacgagataagaaatgtaacgcagatttattctaaacgggaaccaggcgcttcatttaagcaccggagggcacgttatcccggtattattatcgaggtacgctcttcacaagaagtctttataacatcgagacagctttgtgactttcattcgtgcgccgaagaagaacagcaactacagatgcttcagcaaggctctaccaatcgactacgcccgggtgatagaaagcgtcctcgacctcaaacccctccggaacagccaagtttggaagagagaaaaggggaaagtaaatgtggccgtcgaagcagcgatctttgtccgaattcttcgtctggatattcgaaaggtgagctgggttaattattgaatacatggaacaatccgcgaaggatatatcttgtttgtaagtatatgccctataactaactaatgatctcctagttatgagatagtcatttttgcaataattccaagctttcaatgattctttccccacccctacggatctgctactgagctcctcaaacctagaatatatcgactctcgaggccctgctatattccctttctcgatgtggaccagaagacatactaagctcctcaaaagtcaatgtaagttacaatctaccctgagaaccaaaatagtctcgcaagtactcaccattttccctaaagcagaatacaagattataagagcaagacataaacactcccccacatctcggcccgtggtggggacctttgcgccagccaaaccatgtcatctctctagatacgcgggatcaagtttgtttaaggcgcattctcaagagcctcatttccttttgaaaaggagatgaatggatatacagttctctattgaaaagcttgcggcaagtttcaccagaatgagatggatgtgtttattttacaacttcaaactgcaattccgcaattccggtcgcatatgctaacgacggaatgatgacggactttacgactagtccatgcagtccacgcatccgcccaacaaataaagcaatgatctccatcgaaggaaaggatacttaagacgctgtggtgctcattctcgatagtgaggaaacaatcacgatgggaccgccgacctcgaaagtagccctcgtcactggtgccaacggcatcagtgggttttccgtcatagagcatcttgttcgccagtcaaaagaagaatggtttgtatcaattccgatacgcggtctgtatttattcactggatctcacggttccttaggtccaagattgtcgtcacttccagacgccccctgcccaatgcctggatcgacccccgagtagaattcctggctattgattttctagacccagtggaggatatcatagccaagatgaaggacatctgtgctaatgtcactcacgcattcttcacctcctacgtccacagtgacgatttcaaattgcttcgcgaaaagaacgtcccgttgtttcgtaatttcctcgatgcaactatctcatcctgcaataagctccaaaatgtttcgcttcaaaccggaggcaaggtaagcacagcccctttgttgttttatccgactgtggttggctaatcgaaattaaatagtattatggtgtgcatcttgggcctgtgaaggtccccttggaagagtctttcccgcgatacgatgaccagggatacaatttctactataaccaagaggactatctcaaggaacttcaagcgcgtgataggacctggtcctacagcatcatcagaccaaatgccattaacggttatgctccaaatggtgagctcaccccagactgttctaggaaattctaacaccatatcagccaatggaatgtcggaagttcttacaatcattatctatatgctcatttgtcgggagctcggccagccagcaaatttccctggaaatgagtatttctggaactcgatcgatgataactcatacgccccaagtgtagcagatctgactgtgttcgctgcctctcacgaaaattgcaagaatgaggctttcaaccatgtgaatggtgatatcttcgtttggaagtatatatggcaagactttgctgcgtatttcggtatcgaggtttgtattcataccctttatcttgatatgtcaatctcctctaactaaaacgatgtaggtcccagagccgaacttcgtcaaagcccgtcgagctgataccctttcaaacgagatcgacatggtggaatgggccaaggacaagcggggtgtctgggagaccgttgtgagaaaatatggtggcaaagttgaaaccttcgattgcggcacttggggattcttcaactgggctagtggcaaatcctggcttacaatttcatccatcaacaaagccagacagtttggctggcagcgaaatgacaggaccttcgacacttggatcgaaacataccgctccttcgaaaatgcaggagctttgccctcgcgtgcggcgttactcagggactagtcatatcttaccgtcccacggctatactagtctatcatcttcagctattgtttatttcgctatagtgccatatcacgtacatacgaccatagggtgtggaaaacagggcttcccgtccgctcagccgtacttaagcnnnnnnnnnnnnnnnnnnnnnnnnnnnnnnnnnnnnnnnnnnnnnnnnnnnnnnnnnnnnnnnnnnnnnnnnnnnnnnnnnnnnnnnnnnnnnnnnnnnnnnnnnnnnnnnnnnnnnnnnnnnnnnnnnnnnnnnnnnnnnnnnnnnnnnnnnnnnnnnnnnnnnnnnnnnnnnnnnnnnnnnnnnnnnnnnnnnnnnnnnnnnnnnnnnnnnnnnnnnnnnnnnnnnnnnnnnnnnnnnnnnnnnnnnnnnnnnnnnnnnnnnnnnnnnnnnnnnnnnnnnnnnnnnnnnnnnnnnnnnnnnnnnnnnnnnnnnnnnnnnnnnnnnnnnnnnnnnnnnnnnnnnnnnnnnnnnnnnnnnnnnnnnnnnnnnnnnnnnnnnnnnnnnnnnnnnnnnnnnnnnnnnnnnnnnnnnnnnnnnnnnnnnnnnnnnnnnnnnnnnnnnnnnnnnnnnnnnnnnnnnnnnnnnnnnnnnnnnnnnnnnnnnnnnnnnnnnnnnnnnnnnnnnnnnnnnnnnnnnnnnnnnnnnnnnnnnnnnnnnnnnnnnnnnnnnnnnnnnnnnnnnnnnnnnnnnnnnnnnnnnnnnnnnnnnnnnnnnnnnnnnnnnnnnnnnnnnnnnnnnnnnnnnnnnnnnnnnnnnnnnnnnnnnnnnnnnnnnnnnnnnnnnnnnnnnnnnnnnnnnnnnnnnnnnnnnnnnnnnnnnnnnnnnnnnnnnnnnnnnnnnnnnnnnnnnnnnnnnnnnnnnnnnnnnnnnnnnnnnnnnnnnnnnnnnnnnnnnnnnnnnnnnnnnnnnnnnnnnnnnnnnnnnnnnnnnnnnnnnnnnnnnnnnnnnnnnnnnnnnnnnnnnnnnnnnnnnnnnnnnnnnnnnnnnnnnnnnnnnnnnnnnnnnnnnnnnnnncgccggtgagttagtagttgggtgggtgaccaccagcgaatcctcactgttgtatgtttttttttttgttttttttttattcggtgtaaatgaaatatagtaataacatatgtttttatggaacactatatgtaataactttttggaaattaagcttgacgagacataaatttgacgtatctatctaacgctatgaccatctaggcgcagaggtcacctgacccaatggtaacaatgagatataagccgtcttaccattccacccacgactatagtctatagctctcagctattatatattcccctacagtgctgtaccaagcacatacgaccatagggtgtggaaaatagggcttcccgtccgctcagccgtactcaagccacacgccggtgagttagtagttgggtgggtgaccaccagcgaatcctcactgttgtatgttttttgtttttatctattcagtatattattcagtatagatagcaatagatgttcatctcaggccaggttgtgggattctgataatagcattcttggaaattaagcttattatgggtaagcctttgtattgaagtagtatctgaaaatcatcgagtcatgtctgtctatcacgatctataaccaactctataattgcttcgcttcgctgcacaatgatcaggcatttcatatcgcctggatgcaaagacataaatacaagtgggaaagaaaggagtcatatcgtcgtggtcaagtcttcacatcgaggccgtacttcctttcagaccatcgctgcatatcaatgccccatttcgtgatagcaagcacaaggaacccacttattagagcaaagaatacacctggatagatggtcagatatgtcttgatcgtgacctcatctagaaatctcacagattgtaaatgtccatcctactccgatagcaccaattaccggctcaacagccgccgatgctgcagcagcaaagatatactgcaccacgtattttgagctgatcacctccgaacgaacatgcggcataacctctgcaaggtagatagtcagttgagaagtaggacaatagttcaaacagatgacactcaccggccgcataagtattcagtccattgaaagtacccagaagccctacgcccgcaaagaaagcggcgataattggcacaaccataccaccaacttcttcctgtaaagtccagccgtagattaatgttgcacctgggaggaccccgaaaagggtgaccagaccactgttcagtcgatcctgagggaggcgttccccgtttcgtttgagaatccatttcttcacggcgtggtcggacaacctgccgccaatgacgctaccgactagaaagcctattcctggggagaggtagaataggccgctgacgagaggagtcgtcaggttgaaacgtggattgaaaattgagcgggctgatgtgagaattgagtattggaatgtagaaagaaggccacatgtgaggcactattacttgttagtcagccactggacaagatacaatttcagtacttcaactggcagatgatacttactgcaagaaagacattggggtatatgaattgacgaaagatgtgtagaggattgaacatgcttataacagtgcaaaacttcggtttgctagagctccggttcttttcttggatactcggcacgaaaagaagagacaagatgagaccgagtaaagtcattgcgaactgcaaccagtagataatgcgccactgagcaaatgtgacgatgataccgccgatacagggtcctaacaaacagttagccaccctcggatgatagagataattaatgatagtacataccaattgcaggcccactgacagacccaaccatgaagcagccgacagccgttccacgcacagtctaaactcccgtcagtaagtagacgacaatcgggcgggggggggggggaaaggaaaaaaaaaacgtaccggttcaaagatatctgcaagaatagtctgcccagcaaccatgaagaaggtaccggtaaaaccccccaaaatgcgcattgcgataaacatgtgcaaattgatggccgcggcggtaccggctgagcatgcgcaaagcacaaggatagctgcattatatgcattgcgacggccgaatagcttagtgataggaccccaaataaaagacgaaaaacccatagcaactagaacgccggcattggtgacattgagaatctccgatgtagttgaaaactcggtagcaatctccggggttgcgggcaatagtgaagtactagagaatgtgacggctagagtcatccagctgacgacaaacaggatcaggcatttgcgccatgttggtatgccatgggcgtttgagggctggggttttagggccaggtcatcttctgattccgattcttgaggagaatccacctgcggggttggtttttgggactcaagatctggtctggattccatgatgattaggcgttgggtggaattagatagtgtttagtcgatgtaaaaggttgattgaagattcctgcatgactaaagtagtgaaattatgtacacagaaaataatccaacagaatggacattttgtatgcgacccttcggcgtgtagaagctgtcgccgaagtctagtttttctcgcgtagcatttttccccgatgtggatctgacagggcgatcggcgtgggatagccgacagtttcattttgcatttgcacttcatccgtcaagtcaaggtccggtgtatatcttcgtttatatgctcggaagatttctgagtcaagagaaaagaaagagggcgacgagaatggtacgagctcgcgcgctggcctgtaaaataaggcgttttgctggccggatcaccaggtcactatagtgggccatggtaatagctaggaagcatctactcatgtaggtgcaaaactacattgcacggagtatacacttcactcggggagtcactattctcttatcctaaccccaaggacccaccagagagtcgaacagataggcgaaatttagagtcgtgcgatgattggaaatagcaatataggagtaatgagtaatcaaacaggaactgtatataacacaggaaatgatagaagcgatgtcccaaaaagagtgcattgtcgtgatgggaatggtccctaaatactctctgaaaagcaaccacggccttcttcctagtagaactctccctgtaaaatctgtctgggctcggatccgctaggattctgccagtagagagacacagtttcccaggcagtctgcccactcccttcggaaatgaggccagcagattccagatcttcgatgaaggtatatatccagaatctgcacccctcccactcttcagtgaacatgtacctatcgtgtccattcaagatactcaattccgtgatagtttgaactgtggcgtaggcctccacagtgaaggtcaaagtcttgatcgcattatttgtcgacgtgtaagacttggaagatatgtctatcttccctcttaatccatcgtcgccatatccaggtgccatgtcgattctgactgagccagtatcgccaaattgcaggaaggcagcccagtggttggttggaggatttccatcttcgtcgccctcgttgtttggattgatgtagccacttatgtggatgtgtgagacttgtgcctggagatcctttgggtttaaataatccgcatcgaagttgtcattcatttctatatagcgtgtaagtaaatttcaatcttttagaagggatagttgttcacctactaaggtgattgtgaatgatgaactagacaccagtaagtagttgcccgtttttcaggtcggcgagagcgcgaagaatggttattcaaatccataagaaaaccacggacatttatatcttagccagttgcaaaactatgatagagaatgtgatcaataccccaggtgccaatgctgtttttaccgtcagcttcggctttggttagtacttgacgagatgtccaatgaatcagctagcacggtgtatagaaactgcactatttgcaaggatagaagaggtccgggtgtcaattaaaagtagactgttcagatgtcatggtattcttagaacttacattacttctacaactctcatctcattgctcaaagaaaccctgcacctcgacatcttcctctccgtaggcctctcttgatacagatgttacgtattccttgaggcaccagttttctttatctgaatcatttttggccggtcatttaaagtcaaactacgccacgagactcatggagcggcccagcccgggacagtggaaggattgctattcgtttacctgtttctaggggtaactaggtagctgcaaaatcgctgcgtccacttctatgattcgagcgaagcctcacttgtctcgtgttcacattcattacgcttaggtgtcctgtatgcgcatgtattgctggcatgctgaatattccaaattaagacaccaacccattttgtaaagttcatgctctattcagcccagccaatccatagcctgtatgaaatgtctacggccattcctattggttcttttatcggctactcctaggatggagaggcttactgagaaggccacgtaggagtccacggccttcatgtcagatagagcgcagcgtgcagaacacacacctatgcactacacacagaatgaaaagattttacagaatgtggttccactaggatagaaggaagattattaaggtctgtatgatccctatccttgctagcttacctccttggatggtggtgttgttgcgtcgctcgcgtcttgtttgctaggccagactgcccatcctgcatatccttctccactaagtacgtatctattgtgagaatatcccactattgccaaggctagcaccacatgaatatacacacttctaaagtttacctgggctattaaatgcccatgtatatttaggaggctaagatgcagggtatctacttggtcctccattctttaataggtggaatcgtcgcccaacagcgaaccgggtgaacttaaacctcatgcgctctaggatgctagcctcacgcccccaatagccggccgctatccaggagaacaggtgccaccgtaaacgtgcgaaaaagccccaatgctggggcattatgaaattttgcatgcccgcgtattcaaaatagatcggatagaacccagcaagatcccaatctaaaatccaaatctcatccgacggactaagaataatattgcgtggtgcgaggtcatgatgcgtgaagacgaagggctctgttgaaagcatttgtccttcgggagtgggaatttcaggttgatctgctgtttgcattgcttttttcatagaggtgaagttgatccaaaaccggaagaagtactccatgtccctagagctgcatcttgcaggtaggccataccgatcttcgagataaaatgaccgacactcgcccgttgctaatgatccggccacgggtgaggtgactgatcggagatgctgaataaagcgacgaagttggaaacccaactttatggtgagaaaccagctcagttgtgtccacgcttcctccagcgtccttcctggaatacggtccataacacagtacgtatcttccccatccctaactatcctcttcagagcgggaactcggatgcctagttggcaagcgatatcggtcgcccttatcatgtcttctgcctcgtgcggccgatagaactttgagagaaagttcgacgaaagtagggatattcctcgggtggatgcaggcgaaggggagctatggatgcgagaaactaactcggtatctgagtagctccgcagtaagtcatcctggaaattcgattttgtatccatgtccattgttagtatgtgactgctccaacgaaagaagatggcctcagctgatacaaaagtcactagggcaatcacgtgacgcgctctctgttgaccaatcatatccagttgactagctatatttgaattactgggcttcatcagaaagtactggagcacgatcaacaattatatttatcaggcaccagatcacgcgtatctcaatataggggcttatcggtgatggatataacagcccgtttgacatgtttaatatgccaccaagctatgggcagattgcagaagacacggattcggtgacaaagaggaatacgactagctgattgggtttaatctatagatcttgatagattttactcaatatacatacatatggattactatcctgacccaacttagttttgacatacaacaattgcttcccctgtaatcaacaaaataatttcgtagcacacgtaaggacttcacgttcacatcatttagaatcattctactgccatatctaaaaggttttctacaatacttttttattctctttttgacccttatgctggccgataagtttggactcttttaggagctcttttgataattcttctaactccttttttaaatattttcctcctattttctggaaggaataccaagagctgccggtaaaaaatatgagccgccgagtgccgtatactccctcttcggctcaagagataaaaacatagtttgatgcattctgacgtgctcgctgttaccctatacagtttataaatcttcactatggcattcctttccctttctctcacttttctggcaggcagcttgccgttcagcttgctacattggcactttctttgtatatttgcagagatgcttcttctggcttctagggggtagaatctagtggctttgtagcatagagcacaatttaccaccattaccgtttactttcgtaacccactctccatatctactttatcaccagggacctctggtatcattttacttttactcctactatgctcttccaatgccgccccatcaagccctgttataaggcacccttatacctcatttgaaactcacatctattaaaagggtttatcaagcacgtatcagcgttccttagctgcatgaaactcggtaggctttgctccccacgcgaaaccagacctcattcaaccgattgaagctgattaatacaggcttactgaatatggctcaacaatggagttctacagctataggctacagtcgaaagaatattatagatcccgtcccagaaattgtcttcactggaaataaagatggagttcaaggccggtttttccaatcagttagacatgtcgttggagcagtgcttcgggtccatggtatagagagctttatggcagtagctagatcttcatattccatccatcatcatattctcacttttggttgatcatttccttctctcgtagtcagtgcctatattatagttattagagaggacgcgatatcatgtaactacaatctctgttatagaatcctacacttccatccgtcacttcccatgtctacaaaacaatgtcggggagcacacaagaactgcatcattccaatacatcagatatcatcaagatgtcctagtgttccatgtacacttctagttggcctagcgcatatcgcgaagaccgacggaggcctatacgaaggaaaaaaatctcaatcttagaagtcaaaccatttgccttatgctcgacaaccagcttggacactgatgcagatggggatcgaaatgatggtctatatccatcaatgcgattcatcccctttttttgatctcttttttggcctctttctaacattctttctagccccagtgcccctccagcaatgcgagggcgaatccctcgtgagtgagctcgtccgacttgtggatgagaagggccttgccttcggcctgaaagtcgtcggcgttgtgactctcgccctggttctaagggagggagtcctcctactatcttggtggctgagatactgtaccgagcggtatatcactcgttcgttgtctaggatatataggaacaacatgctaacctttggttcttcgatgtagtcggcatagaaaagcggatgcagacgacgttcgcgctgccggtcccgatggcactaaggtacaggcggatttcacccaaaattgagccaggaggggtgctgtagtaggggaataagaggaaggggaggggctagtccctcgtataattatgatatgatcattgatggggaggaggggttggcatccattgtatataaccaatccggccaactgtatatatcaacagcggtctaaagctctcataattatcacaaatacccgcatccgtacatgtatcgctgatatagtcatataaacttaagaataaatatgaccaaggagtgcttgatcttattagcttcttcaaataaggcagccataaagaaaagacctaggtattctcttacagacagagagagaggattaagaggaaaccgagatataatgaatacctacttaaagtatcatatcaaagataatagtgagactacaaattgagattagagagctgcagatgctatggtctgaaagacatggacatgataggagacgtgaacacatcccatgagcatgaaagcaaaagcatgacaaagaacgtacccactgtcccctcgtctctcatctgctctctttccattaccggtcatgaagtagaaacctagttgcttgaggggacgggacatccagggactacagcaaagccgattccagtgtcatcagagacctatatgagtagtataaaagctcgttcatgccgcttaatagaactgttgccgcgcgaagttgcagaagtctaatatcaacagaaagcgttttacatatttaagatcagatttagatagtcaaatagcgttacctataggacgatttttcccatttgcattgtacatataacaattttcctttataaaactctctcacacacaacttgatacatacgaccatagggtgtggaaaacagggcttcctgtccactcagccgtacttaagccacatattctgcacggccaatacttaatgtgccctcagtacctaagcggcactctagggtgagtgcgggtgatataggtaagaagtcttgagactggggtaagaaaggtaagaacggggtgacaattctcacccttaaggtaataggggctaactcactctaaacctatatcagtcctaagaaaaatacaaatagtcaagccccgaggcgcttctcttactctaccatgattttctttgaatctctttaccagctaaaatatattctccgaaaataatatcccaaaagcactccaggaacgtctcgcacgtgcgatatcacgtggcttcacacgtgactattaatataagaaggaaaaagagggtaatactatatactaccctgagctagcgcctactacgctagaaaaatataaccgtacagttaacaattaggcactgtaagcttcactcggattttaccgattttagttcctaattattagtagatagaggatttcctataacgagtctacagacccaaattttcctaacctacctattctgactcctgaacttttgaaacttttcgcagagttttatatcaaattatataaaaaggttctatctcagcagtcagcttataatcacttcaccagctttatattgaagtaggagcgagaaacttctcgatcccttcctaaggaagttaaggacgatattcttaatataagaggtaataattatcctttaggactcgctactaataaaaataaaagtatattagaaccgaactcacagtagaatataagctccctacaaagcccagagagcggttcctagtcaacgggaaggacatagcctacctacttcgatacctatttatagataactgtcacaattatatatatgagagagcacgtatatagaccgtaagttctctctctttatttactggcttaggtataagagcaggggctgttatcgaatcaagtacttattataaattaaatgaatgcttatattatagggtttgtatcttaacgattacaattcctgattatattaaaactgactgataattatcagtaccttttattttatcttaagtagagtaaggaaagggggtctctaatacgttaggtaataattaatcctaaattcttaaaaggctagtgttatcgcgatgatactaccttataagtttacgagctataatcattctatctagaaatagctgatataatagaattagaccaaaaaattggtttagggagtatctagtacttaggataagttttattttctaggtaattgtctataggatagcggatggtgcctttaaagggcttgccactgtaactaaggttcttaccgcaaaactacctaatagaagagagttatagaccttagaatagaatgaaactataaaggatttgctattctttagaagggttactgcttaaagacccgacctaacgaaggcgttaaccttctccttattgtagtacaactttactaccttagcccagcgggataggtttaaagaccagttacgcgtatatagaattcgaggaggcattgtaaataagatcgactataagtatatttgtaccgttatacctcaattttactaaggaatttcagctaaggcttcttaggctacttatagccaggctcttaattactagaattataatacctatctaaaatattagtcttctcttaaggtattagatatataagccttattctatgatttagaccctaactacgaatactacgatatagaataaagcatatcttattactgagacttaaacgtgccgctaaaacttaatatagctataaccatataatttaaatctaataataaaattattaagatcaattagagaattacctacttaacacaggagattactagaagactagaagagaatagggaccttatatttaaacaggattgtctctataataagaaagtaaagagattgcttgcctagaagaaagactttattaaaaactagtaggatactttatatactaagtatatatctaggaacaacttttctaaatataatctaacgcctcttttcgatatctataagaaatatctactagagcgctcctatcttagtaagaatttattaaagaaagtaactctagatagtaaacttagtcgatagtacctagaagatatagtcactatttatatatcgatagaatatactatttactaccctagtatagcccctaaggaaggccgttatctaatatataataagtctatactagagtaagtatacctaaagagtattatagattaaaaagttaataagaagatagtattctactataagggagagctaagtatatactatagtgtcgaagaaaatccttaaatagtatataataccagtagtgctataagaacgaaaagtatgcctatcgacgcgtatagcgcagctttatttaattttattatctttatactaaactcttccttaacgaagattcctaggagaattattgcaaatactatcttaataaccttaacccctaatatagtcttttgactttccgctccatacttattacactaggattctgtccattctgcctaggcgataaaagtaagaaactagacgagagatttcaataataggttataaaatcaactcttttaaatcatattaacgaatacttagggtcagcggactctttagccgcagtcttctgccctcatctgtgttacgaaggaaggaagtatattgataacttatatctccagtggcacttctttgatatatattccatagaagagccccggtcaaattgtgttaaacgaaaaagaaagtggcagcttcagtcagagcctgcaggaactacttttgggaatttgagtgatgaaacattgccgagtttagaggattattttctcaccagcactctgccaaccagttttgaggattcggatatgacctccgcagatgatttatttatggaatttgtacgcttggatgacgactagggcagagcattgaccagggttatatcgttgataatgactattacaagaaacgaaggtgcttggtgttgcactaatcgtcattcctcgctatttattacacgattaaacgatgctagattgacggcatatttgttggtcagagatttagtgttgatacttatttctttcttcacatactttccttaacaattttaatgggtccgtggtcaacaatgagagtgattgtactttaccttaagaattacggcatatagtacccctgactttgcagcacttccggaaattggtgtcaccacgtacacacttcgatagattctcgaaccctagtgccaagataactagtctgttctattgcgtttgacaatcgcatagggagagggcaacaacacgttccagcttgctcgaggatctcaactggggtatttttccgtataaatgcgcgatcaccatgcgatctggatgggcatctagggggatgtccgtataaaaaccacagcgtatagaccatcagcacctgacgacacccttagatgtacatcccctcggcatggctctataagtatgcatttcacaggctcattcaccgtttctaggcaggcccttagtgatatgtgaagtacaggcctaagtgctaaatctcgctctaatcctatctagcattttgcgagtaaagtaattgcccgggcatcacctaattaccagatcgacagtctacaccaatcaagcgcatccacttgcactatatcatcagatcgacggctacaccaatcaagcgcatccacttgcaaaacctggttttataaaacgaggtcactaggctcgactgctataacatttatggagaagcaaaaagtaagggaagtctctttcgtattcacgctagtgatatggaaaacccggtaggcaaaaccatatccaaagagatctatatactattgatcttttctctgcacactatagggtcgggtaacgcggttctatctgagtaggaaaagaaagtgagagtaatcgttcaatccaagagcgggaggatgagctatatcataaatgatattcagagggacaaggccatttgcatagtcacccgataatcatcttatccggagttagtgcagctagatatttcgcttgatgatgctgaagtggatgatggagacgatgccgatatcgaaggtgtagattccgatgaagatgatgattccgatgccgataaagacgattccgatgaagatgccgatgaagacggtgaagacaggtcggaagcaatacacgagctgccaaccttaaatccgttgtccaatgtacaccctgtctcgtctccattttggttatagaatttaaccatcccattttcgtttatatctatccatgcaacaggcatgatgttgtctttcgtgctgccgcatacgcccacatcgagcttggagtagtccttacggataccatgtgtaatcatgcttagatctagggtttcgtcagtactaatagtatatcggtggaaccattacgcaccagaacaatcgtctccatcaaggagaccaaaagatgatgaatgtcccgtgcagccatagttatcatcagaccatatcacgcattggcgatcataatcgataaccgtgagactgccacctaaggcggcgcgtatgtagacgctagcgagaagtaggaagatagagaaggtcatgtttcgaatatttataaggattgaaggatgatagacggattggtatctccagccttaagctattgtgaaaagtgacgaatttgtacggcatatctgcgaatttaaatgtccacacgtctcctgatacactgtgataaaccgtggcaatacgcgcgcaacacttgcgacacactttgcgacacgctttgcgacacgctttgcgacacgctttgcgacacgctttgcgacacgctttgcgacacgctttacgacacgctttacgacacgctttgcgacatgctttgcgacacactttttgaatcgaggtcccactaattcctgacttaatcttagctcctaagccagcttgcgtccctacccctgatacgtagctttgtctagacagatatgtggggtcttgacacggaccatcatctacctgtctgtggcggcatggtgctcaggtggattggggttactgctctaggagtcgcactataaactcaagtattggcgctgtcctataaattgctcgtacagtttgatgattttttagtctacagcctgatttagacatatgaaggcaggtattcttctgcattaatcttagatcacgtatcccaaagtccgttaggcttgaacgtaagttttgataatatctagcaaatactatacatgctaacatcgcctagaatgaagggaactgtcacctggttttgcgtgtcttgtcatgatattgattcccatcgcatgaagatcaaattcacaggaaacgagcctggatcctattttgtttgcgtttggtcgtatttactccctgctaagcggcgcatcaacatcaatacactatgcacaaattgcttagaggaaaccaaccttctgtcatcgaaggatcagcgagagttcatctacaagaagaaggatcaaatcatatttgaaagacgtgttgtttgggcaaagcaggagtgggacctttgggttacttctcgcgaatgccaacgcatcaacgaatctgtgcaacataatgggggcttgtgtgttcatctatttggtggtgttggtatatattagtctcatttcgagttctcaaggcggggcggatcagaaaatccgactaagggcaagattgtcagatattaggttataggaggaattggcataagaacactgtcatgagtctaagttctgtacagtacgtcccgaaaccggtgcaaccacctcactctccgcctaagggcaagattgtaagatattaggttataggaggagttggcataagaacactgttataagtctaagttctgtacagtgtgtgtttttcatttaccctgacccctcgcaaattgaaagcgatatgcaggatgttctgtacagtggaattcgaaatcagatttaactttgcactcttacgatatcattcccggacccgtagggacacactaatctaattttagctctacccctggtagagctgtatcgtactggagacgcgcgctgcgcacgctgtggccctgaaacgatttatagggaaaggccggaacaagaagtgaagtcatatttgtgttgctcgactggtacttggaattaagtgacattgacgaatcaggacgtagaaaaatttgactaatagccgcaaaatcttgaataaccatgaatcaggtgtcgtatttcgattgtgcaagtatatcggcatatgatgtcttacgtggtcgttgggaacgcctctccggaactggggtggtagtccgcgacgaggctttgatttcttcgggcgtgtctggccatgtaatttgcgcgtcttcctcatcgtcgtcaccaggcgcaattatttgagtgggatcctgggactggtacgtgataggaagggactcggtctgtggccttgcagccgatttggtgggcgtttgtgggccggctctttgagaccaacggtccacgcgcttccgtttaccagtagcgggaggagtagcgggcaactggtgattttgtgttgggagaaaatgtatatcatccgtaacgatagctaactggcgatgctcttttgtgaggccgaaaacacgaccggtcaagaaaacatgggtgttcatactcaagggtggaaagttggcccaacgctgaccatttttaaagtaagcggtgatgggaaaggtgtgattggttcgggttgaactattgtaaacagtagtctgcagacggtagtgaagaagagtgggcccgccgttagttggccaccgcgctcaataacgacaccgagaaatgtcactattggctgggcagcctcgggacagtacatgaaatacgattcgatatcttcttcattccccggatgactagattgcgtaagcttggtactgtagcagatgggacaaactgaccggtccagattgtgggcgtggaggagatatgaaattcctcgtcatcagatgaagtagtcaggaatgaaccggaggaatagacgaaagtgtttggtttgtaaaggtcggactggttgccctcattgaaaaatctgaccaaggtgagaattttatcctgcttaacatcgtctgactggatatctttccatggtagattgagcgaaacacggagttgcatggaaagccctttgccgggacgtgtaggatccggttcgacatgctcgacaaagtcccgaatatggataatagcgggaaaagttgaattggaaggcataatgttctcaggcgtatatcagacctaaagaggtggaggtgaagtatgtctgatcagtggggtttctagcgaaggctcgggagtgactgtgtgatgagaggagaagtgagtaagagagagacgtgattttgtgtttagggttattatggcgcataatccctgttgtaaacacgggcacgtatatgatatatcctagatatatctcaccactggtttgataagaatcttagtggatgaatttaggatttaggtttttgcaagccatcatttatgtatgtaagacgtgagaatgcaactcgttatgactcaacaaggttgataagagaattggtctatactattaacacgcagcgagtttcgaaaacagcttagacctcaaggcaactcactatttgtttatcggcgtgtactcggaactgtactatgatcaactacgacgtaattaataaatatatagtaatagataattcctttaattccagaccgaccgcatctttattatccggatccaacttcaacctgcatcctcgtatggacagaccgaagctgggattaattagtgatatgatacatggcgaatgtagggaacagaccatcaaagatatctggttacagcatgcgtactatcgaaatatccatattcaatagaagtgcgaatactagcgtgaacattgttttgtaattgacattgacttctcggttttcatactaagtaaagcaaccgacggccatcccccgcacaacggctgttcgccaagcacccttgacaaactgttgagcagtggttcacagctacattaggcgatcttctcagttgtgttcaagtagaagactggagttcgatgatgagcctctcgatgcgttgacgaatttcgtgacggatagtccgtacagcatctaacccttgcccggcggggtcattgagttgccaatcgaggtagcgtttgccagcgaagaaggggcagacatcgccacagcccatggtaatgaccacatcgctgtcttggactgcatcggcagtgagaatcttgggtttttggttgctgaggtcgatgccctcttcgcgcatagcttcgacaacgactggattgatggagtcggctggggccgatccggcagagcggacttcaatggtgtcaccagccagatgcatgagatagccggcggccatttgggagcgaccagcgttgtgaacgcagacgaacaatacactaggcttagccatgatgtgcctttgggatcgattgggcggtcgttgtggaacagctcgttggaagagcgactcggttgttaaagtagtccgcaattgactggtacaggtggcaaacgtctcttcaggtaattatgaaacgagaaaagcttcataagcggtgtctcaattcccgtataagtaatgtgcgagagactgaatggaggcagcgcgtggggtttatataacaagtaacagcttgtgagagagggaactcaacaatccgttgatctagaacattctctatctagcagaaaaaggcagacttgtgtaatatctcattcactagcggctgttgccccacagtttatcaaagcgttgattgagaatctgtgatatagtcacagtatgtgcaatgtcacatcctgccggcattgccggattagaaatcaatacctggccatagcctcagatcctgagcactaagtgcaatttagactggcagcaagcaggccttattctattacgtgacgagaggacactgctatcgaatcctattccaacacgggcgaagttctgtaccagccatagacatgtcactcgaacaatatgactggtcaaagtttgtaagaaacacagagactgcattctatccaaaatgcgtgcggaacatcgaacaagttcgagcctcgaaatcttacatgccaatgacaaagcaagagtcgccaagaacttttgctgtatgtcactcccttgtgctgattggctaagcgtaataaagtgtcactcgtctagtttgattggccaccaaaatgccctttccgagttaatttggattagtgtcgcccttcaaggcaagaaatcaaaatctatatatattgcagacgactctagctaacaagggtttgtgcaaatcactagcgtacgttttgattttccttcgaaatatccattgaggacaatactttcgcagattccaagccatcatatcttattcggagctggatatggcagccccaacaggtctgcacccgacgaaggaatcggaatatcataactcaatactgcatagccagccgccaactcctactgctgaggatgtcgaaaagcaagaatcggaagagtctacagccaagcaatcagccttcaaaggtcttggctggttagatcgttttctcgccttgtggatcttccttgccatggccgtcggaattatcctaggcaactttgttgaaaacacgggtcctgctctccaaaaagggaaattcgtgggggtttccatcccaatcggtatgtgcgcgtgaactgtgaatttacaaggccttggctaaccggtgcaagcaattggtctcttggtcatgatgtatcctattctttgcaaagtacgatacgaatctttgcaccatgtattccgagagcgtggggtctggattcaaattgggttcagcatcttcatcaattggattattgcccctttactgatggtgagactaatcccactcctcatggtgatgtgtactgatatgatccagcttgcactagcatgggctttcctaccggacgagccagaacttcgggaggggttgattctcgttggattagccagatgcatcgctatggtaagttacccctttctttgtttatgttgtaccggattcagagactaattgatcatgataataggttcttatctggaccggtctcgctggcggtgataatgaatattgcgctattcttgttgcagtaaattcactgctccagatggtgctcttcgctcccttggcaatcctcttcattaaggtcattggccactcgggcagtcaagttacactctcatattctaccgctgccaaaagcgtggcggtgttccttggcattccattaggtgccgcaatcattacccgcattgtacttcgaaagataactagcccacgttggtacgaccaggttttcctgaagtgggctggcccgtggtcccttattgggcttctttttacgatccttgtgttgttcgcatctcagggccgccaggtggttcatcagattgtatcggtcgttcgagttgccgctccgctcatcgtttattttatcgtcgtcttcttcatcactcttcttgtgacttacaagctcgggttcggttacaagttgtctgctactcaaagtttcactgctgccagcaataatttcgagcttgctattgctgtcgctgtcgcaacatttggtgccaacagcaatcaggcgcttgccgccactgtcgggccattgattgaggttccagtactgcttggccttgtctatgttgccaaattcatagctaagcgagctggctggaaagactgaatcgaaaaataagaggaaatttgcgacttaggctaggctatgttgaagcgaggggaccgatctcgaggcgtacagataggcaatgaacttaacagtaatagaaataatcataatttagtggtcaaaatttgtctagatcaggctgaacatacgccatacgacttcccgggtgataagcccgatctgtagtttgaagtgtcaatggatctctaggtgacttctgagttaagataattatgagactccgttgtttaacgcgtggatagcgtacatactgaggccgaccgtactatagccgataataggagtatccctttagaagatgtaccctttcgtaagtaaaaagggaggtatttgattgggaagagagggggaggggggcggaattctaaggcaaacccccatccaataaagttcattgagtgaccaccggaacacactattcccccgcagaaatttggtggcggtctacatcctagctcaaagcattgcttattaaacaaaatatggagaagctcccgaatcagcacagcccagccgagccgagtcttttatgtcacaactacaaggtaactggttacctcaatatgtctaagtcggtcccccgaagacatttccaaatcgtctgtagtccagtccctagagctcgagaaattaagtttgcctaaagcttttgtgtctgttagattcatctgtccctttcctcccccctttttttcaccaggccacaaaagactcttgatatccatcatccatcgatcgtctggcctgattaattaggtattatgtgctttaggtggatacaacaccaatttcaaagttgaaaccccggtacatctgagctattcagctattaacaagagcacgaagatcttttccagcatgagcccctggttatcgttgttggcattaacacaacccgctgctgtagatgattgttcttcagccactaataccattactaaaacgacatcttctgttccgaacccgttattgccatgctcatgctatatttctattcttatgtcggacaacattcagcgcagaagtcaagacgacgtccactcaccaaatggacctctagtgcatcggttgtactcaaaactgaacctttcgcagccggggcgacggtggcatcccagatctgatgtcaagttgctgcctgcgaagtacgaattgactgaaccgtctgatttggtggtgcttatctcgagcatgctcaagaaattgattcagataaacgacaaaatgtcactgggccagggtcaacaaactaggtttcactctcgtactgcgccccaagtttccgtgtacaattaccttcagcggttggctacgcacgccaaactcccgtctgcgatacttctcagcatggtctattacatggatcggctctgcatgttatatcctgctttcacggtttccagtctgacgattcatcgattcctagttgtcagtgcaacagtcgccagcaaaggcctgagcgacagcttttggaccaacaagacatacgctcgaataggcggaatcagcacgatggaactgggcatgctagagcttgaatttttgttcaggatggaatggaaaattgttccaaagccagaggtgctggttgactactaccggtatctcgtcgatcggtgtgagagcttcaagatcgatgatccgagttccgactctagcaccgcgtcagtgttgagataatccacccacgtgatatcggcaggggaggggataagttctgttcctaagagatttattcttaaataagggccattaaagagtcggccgcggctgggtcacaataccagcatggatggaggattacaccgcgtctggttggctacagcaatttttttgctttggttaaggttactcgtcgtaggagataatgagatagaaggctaaagtacgacatttgaaaagcatagtttcacagtaagggactatacagttctttactctatcgtccactattcacaaactgtcttaaatcataactgcctgagaatccctcttcgaatttttcaatcttttcccgcctggttcgctgaaatgatcagcaagaaaattagatgtgggcccgcaccaatattgtatatttaacaaagtcctcgaaacagtcaacggttgccaataggcatgagccgctcatccggattgaccttcatccggaatgggtgtacgactccgtaattgagaatgatttgtgatggtaacatacgcatccagccaccgaggatactaaagcagttaacagccttaaacaattgtgatccaccacacatctggggcaatggcgagcattcggccttgagttggacaagcgcttgcagtgcttaaaggaatccaattaatgcatcgctatggtaaggtacccctttctatgctgtcggactaattattcatgatgatagatcgtattgtctagctttactgcatctgccagagattcatgtctatcacctatccaatatgtcgaaaatggacatatttttcaccatgcaatttggttctgaatcacatccaagttcggatcggacatcacgaaggtctgaatgatttcgtatactttcgataaggcttgctgcagccacgcacgatgtaaattgacctgtatcctgaacaccgccaaagtgctctgattcagggacagtttcgcctatgacagaaacgagctcgactgctcgccctgcacttgattcttggatattggaggcatctatgctggtcattgcatctgatctagacggtgaagacctcatctcaagagtcttaagcggatgcgatgagttgttcaccttcaaaggagttgccaatgaatgatggtgatccacggaagtttggccgtgggccgtcggcaagtgcaattttgctgatggtagggagaccactggtggaaactgagaacggatagagcttgctgtttgtctttgagattccaagtattcttcgatttgtgtttcggtgacaccatggatcagcagcagggatcggagagaaacgttttctgctgcgacttttcttcctgctttttgaacctcctgtgtcgccgctacgccaagcctttcatatgaccttaattgttgctcaagttgttgggtgtattccttgcgccgtgtgcgagaacgccgttgattttcgcggattcgagcggatgatacatcacacttctccatattgacagctttctttcccttcatccctgtgctcgtaaatgggaatgcaagtggtgaaggtacagatttgggggtataggggaactcttagaagtctgaagatatggtcaagctgaaacggaactcagtggcgacttttagtcattcttctaactagcctaaccctgaaaataactatccagcccgggtggggcaaaaaacatattatccgggaatctatttttaatattattgtccaatcacatttagttaatgacatacttcctccctttggggaagttttactatacaactgcacgtataggcaactttctgactgtcttgcctttttgttacctttgccacctaccttcgcgagtgtaacctatgctatcttactttatacaaagagcgccatcgacttttaggccggcaattccatcatccctgctgcaccctacatattcagcaaggatatcttccgctgttcctcaacaagtgattgcgaacacccgccaaatcgatgtctcatatcgaactctagagttacgtccaagtgaagatagccgagatatccgccagaagtatcggccattcatccttagcgacgatgcaactgaagactgggtcaataacttagacttgactactgcaatggacatggctgaacttgacctgcagcttacaaacaagaggctgagggttctggtactttatggcagtcttcggagaaggtcatattcgcggctagtggcactggaagcttgccgtatccttttccggctcggctgtgatgtgcgtatctttgatcctgaaggtcttccggtaaagaacgacaacgataccgatcatcctaaagtacaggagctccgagagcttagtgtgtggagtgatagacatgtctgggtctcgcctgagcaacacggaaacttagtgagtgacctttcgcgagtgttctaatactcagtgcagtaattactgactcgttctatccccagaccgctgtattcaagaaccagatcgactggattcctttgacgactggaagtgtccgtcctacccaaggccgaacgctggccattgcccaagtgtgcggtggatcccaatcgtttaatgccgttaactctttgcgtatcctgggtcggtggatgcgcatgtttaccattccaaatcagtcctcgatccccagggcatatacgcaatttccggatgaaggtcaaccagaagatcaacgactcatgcctagtggcaaccgagatcgtctcgtggattgcatggaggaattcgtcaaatacacgattctgatgcggcctcatatcggtcttttcggtgatcgctttagcgaacgggaggagaagaaagcaaaggaggaaaagatgaatgctgctgcagccagataagagatatagagcattatagacaatgcctgggagacaatatcttataaaacgattcttcagcatagtgaagtagagttggcccgtcgtttaggtgaccaccccgctcaagaacgacgccgaggaaagtaactattggctgggcagctctgggacagtgcataaagtatgaggctgtatcttcctgattaccagggtgactagactatataagcatgtaactggaatagagaaggcaatgccgatccaaattgtgagcgtgaagaacaatatgaaacctttcatcctcagacgaggttgtaatacaaaagcatttggttgataaagatcaggccggttgccctcattaaagaacctaaataaggctggtaatttcattctgttcaacatcgtctgaatgaacatcctggcttggtatattgggtgaaacacgtagttgtatggaaagccctttaccggggcgtgttggatccggttaacattattgaggacgtgaagaatggcgggaaaggatttatttgatggcatatcgaaagtagatatatacagaatagtgtgggctccaattatctagggggataaaaagaaacgaataaagtagacatagttgtggtgaagcatatcaggcgcagatacgagcgaaaatgtgatgagtctaaacttcctgaccgcttcttcgagaggttattacgacatataggacaggagtctactcatacaaatgcatgtaagacgtggaaaaagatgattggatatttggccacttagttttaagaatttgtctgccacgtaccaagagtagggacgcattggagagtagggacgcactggagagtagggacacaccagagagtagggacgcactggagagtagggacgctctagaaagtagggacgcactggagagtagggacgcactagaaagtagggacacaccagagagtagggacgcactggagagtagggacgcactagagagtagggacgcactggagagtagggacacaccagagagtagggacgcaccagagagtagggacgcactagagagtagggacacaccagagagtagggacgcactggagagtaaggacgcactagagagtagggacacactggagagtggggacacactggagagtagggacgcactggagagtagggacacaccagagagtagggacgcaccagagagtagggacgcactagagagtagggacacaccagagagtagggacgcactggagagtaaggacgcactagagagtagggacacactggagagtggggacacactggagagtagggacgcactggagagtagggacacaccagagagtagggacgcaccagagagtagggacgcactagagagtagggacacaccagagagtagggacgcactggagagtaaggacgcactagagagtagggacacactggagagtggggacacactggagagtagggacgcactggagagtagggacacaccagagagtagggacgcaccagagagtagggacgcactagagagtagggacacaccagagagtagggacgcactggagagtaaggacgcactagagagtagggacacactggagagtggggacacactggagagtagggacgcactggagagtagggacacaccagagagtagggacgcaccagagagtagggacgcactagagagtagggacacaccagagagtagggacgcactggagagtaaggacgcactagagagtagggacacactggagagtggggacacactggagagtagggacgcactggagagtagggacacaccagagagtagggacgcaccagagagtagggacgcactagagagtagggacacaccagagagtagggacgcactggagagtaaggacgcactagagagtagggacacactggagagtggggacacactggagagtagggacgcactggagagtagggacacaccagagagtagggacgcaccagagagtagggacgcactagagagtagggacacaccagagagtagggacgcactggagagtaaggacgcactagagagtagggacacactggagagtggggacacactggagagtagggacgcactggagagtagggacacaccagagagtagggacgcaccagagagtagggtatcagggatgcgcaatcataaagttacagtatcttagatataaagagtataacctcacgggaacccgagagatcgccgagaaaaatgtggagaaactttttaggatatttgaaatcgaaggctgtggtaacctagagcctaagcacagagttaccgcgactattaatcaggaggtcctaagaaaagcacttacaaaatcaaatctcaccctagaagcacttatcgatctaaaaaatcagccaaatctcctattagaaggagaggatatcattacttgtatatataggaaatattgtctaaaagctggcgagagatttggagaaactatgtgactggttgatctttatctaaatagtagggcagtattaaaaaatatcgaatagagactaataacgttatagatatctcgatcgatatactcgcctaattgcgcgaagaatcgatataaagtataagctttactattagcgaaatatatcgtacccttaggttataccaaatttcacaaaaccctacttaagagtagaaatagtgggctagacttggttccaaagactattgtaaacaaatacgatgcttataatataacgattaacggcgttgtattttagacaagttattactatacgttaggctatagaagccactacgatcttcctaaattaccaggatattaggtctaaaatgcctagaggtatatttaataattgtatgcctcgtatatagctaacttcctagatactgaactattatctatatatagtcctaaaaatatagataaaatttcttaaatcttaggataggtggcttatcgactcagattctatgtcctatattaaaggattaatacctagtatcgctatagtagaccgaaaatgtattactaatcttatagatttaaaaaagatatttcctcttcttagaataacttaatatagggaagtccttaagagtcactttctctaaatacctaggagaatattatctcttactacacttatctaagatatactgtttattaagagactagtaagagcgctctattatctctatcctctaaaatttaaataaagcctttgaaaagttatacttatttaatagaatcttatcggaactagaggtctccttaaagtctagataacagaacacgagtttataacgttataataaactgaatacccgttcgttatatctatactatagctttagctttttacttataggtattttgtctactaaggaggctgtataagaaattttcgataacaatttgaatattttactatagatatgagcctgagtaagcttgctatattggcttcgcgattaggctttaagttggactaaattaggtagctttaaagtagaaatttagggtaatatatggtataaggcttttttgaatcacttagtagggaggagttctataaatataaagagcgaaaggtataattgatattaaatagactttagaatatattacagaaccttcctaggtatctggcggaggataatagtatagcctgatttataacaaatgacctagaacttaaagtaagctaccgatttaatagcctagcataagacgagtatctatagtagtgcagaaacattttttataatcaaatctttggtcctaattagccaccgttagaatatataacgtcgctcggtatggtaaaagatattattagattattctttagtaaaagtttattttttcagctaattttggatgaatgataagctacccctatctaaagtcctataaggcttactgagactgtgctaggatctatcgatactaatatggattttaaagagtggcatctataagttcaacctataaatctatcgccttcggaagtaccctaacccttaataaactctggactagagttggtagaggaagatactagtaagctaatagagttggctaatcacctaagtggaactcctgattgtgatactctaccgttagcagctggtttcgaggaaacgtcttaactaatagaaacgaaaaactacctatccgttcgaaataaggtacctgagatccttttaacgtggtatcgattatattaagaagtgatcgttttatacctattcgaatcacaagtctattacaaattcttcttgggtggtggatttaacctacgagcagtcttacaagatctggtaagtgatcatctctttatagtgattaatgagtatagaataggcactctggatatgaataaggtatataaagcagctttgaaagaacggttgatacttatcgggaaaatagataatccaagttatggaaatgacatggaagggacgattttattggataaactccgtgattacgttctagactatgatgttcatataggaaagagaaaggcagattctacagacaatcgatcgagaaagcgtcatcaggacacggtacctgataaggagttataaggaataaaactgttttcttgttcttcaatcaatttttcatctcatggaggatattactccctccgccacttatctgcactgttacacccccttttagtctaataatgagcttcactcttatctgaaggattacgcctctaagcagacagcggcagtagttgacgacaccatagtggcgtactacgtagcacacctagtgggtactgcgacggatgctttacccccagatttgcctataataaattccgaagtacagaatatagacccctttatgctgtggatgatcctcctggtgaacaatgtaggacacaaaaatagcaccacaaatatttttttggctttctatcacttcaattgtagtcccgacggacgaagttctatttcgtttgcacatttggtagccccgacaggtagagatttgcgaacgtagtaattaatattcttctcagctcctcatattcctaatagctaatttgttggggtgtattatatccaacacatcccatcaaggtgaacgtcattgacacgtttgccaatgcggattcctaaaggaaatgcctggtggtaatgacgctttaaactccaacatccccctgggtttgccagatgaagaaactcttcctttcgatctattattatgcattcacgtcttcagtttaaatgatactgacctttagtagatcctctgcggaactagaagtattcgccttctcgacaaacgactgcgccaacttagaaagagacggcatacccaggccttgcttagggtcgcctacatgagttggtcggtcacttaatgaagtcacgatagacccaatagcctcgatgtcttctttgatgccgtcgcgcgatcttctcttcattaaacactcccctatatttgctgtctaatggtcagagttggtcatcatattcatcaagtcccatacctatcttgacttcgcctttcgatatgagaagtatattgctacaatccaacaagggacaagaggtcttcaactcgtagtggataaaaataacccctctaaggatctccttgcagatagttgctatatctgcttcactgaagcgaacattcgttgctacacaaccaaggctaatagccaaatgatgatattcgtatacgatgtagaacttccctccagattgaaagccttctatcaaacacaccaagttttggtgcatgacagattgaagtcgtctaaaagcgtgggtgttttgaatgctacactgcttaagaaagcaggtaggtaggttctcagtgtctttgagccctatcacgcctgggcctgcctggtcaatgttgtaagatagatggtactgtgccggtgattccactttaacagttgatgagctgttgatattttcagttggaatgatagggaccccaagtcgatacgcataattattttggaccaatttctcattgggtttctcgatttcggtactttccttgacgatacttccattgtcgggccacagtttctcaggaaattgagtttcgcgcttctcccgattcaaattggatgccattctgaactggttgtgaaagtggaaatataatattaacactttacatccgaagtgctgtccttgtttatatatttaaggattatatttcgatgactaatactcgccttgggcaccctgcattcgcggatatattttcagtgtcgcagggtggagatttagtaaatactttaaagttacgatcggctaaattgcccgcatatctccagcatttattgatgtgttaggcaccggacgtgcagctaaatatggttgaaggtagctggtcggtaaattttctcgatgtaagtgattttatacaaatctagtattttagctgagagactaaattgaagaacactcttttctattccaccgtatttaagtacttagattttggccaacaaagtaactatatattcatgggaattccttctctgcgctttcgcaatgcctaatattgtacattaccctgttctctagcgtctttacattcgtttcgttttctcacagcctaaggaaggcgcgtaagcttccagtttgaccccaaggctggaactcaggttcgaatagctcaacattcttatctacgcgtgacctaaccaagttcctgatatcataccgagtttgtgtttatatatatactggtttgagataagagggcgtttcataatgaagggagagaataaggcttacctaggataatcattttccctatttgatttcctatctctatatcaagctgctcttcctagctaacgcgtccactgtgtatatcgataagcctattcttaccaatatgctgaattttattttctaagtgagtatatagtagatcgtaaattgagatataaagtatctgcttagtgtaagtagatagtattgctaatatagaaatgggtacaaatgtatccattatcttacctaataagggtctagagtaggtctcgtatactcttataattactaaccctatctaactgctagataagcgagattacctatatatatacttaagcctttttatagctatcgagaagctccttaatatatagtaattgagccgcaatgccgataccggtagtaattataaaagtatatctatagttaccgatattataatttaatctctaactaacagataatagactaaaagggctattaatctaggccctatattctctgtttagcttaatataatcgaagagtctctttataaaactagaacgaggacgaagtaagattaagattaaaaccacctagctattaatattattttcctactagctgatagtaaaagggtgtgattaaaaaatataaaagattcctatagaaggaactcctaggttaatatattgactagcgcgtacgacctacagtctaggtaataatagtattattcgagtaatattacctatatagggttgtagatttatttatatatagctttttcctatcactatattgcgatagataatatgaattagctgtaaaacccctataataacgaaggtatatataaatactagtaggaatacctaaaaattccctttagccgaccggatatactactatactctatagattatcgttactatatatctaatataggtaataaggaatacttcgtaaacccttttctttactaatagtaatactactaaagctaaaaatatactagcggccttactaattttagtatctatttaaactttaggagctctaggaaaacttactaggagaccgtagaattatatcttatttacctaagatattgcccttaattaagtaacgattataatataagttagagctttaactagagctactagcgcaaataatcgataaaggaatctataggaatagaaggaaattctaagaagataagcgctaaacttataactactacctaaaaacattggaaataagttaataagtaagagcttcgctgccctcttactagtatcttaaacggaatggacccgtataatattgtagacactagtgctggtaaaataaagaactattaatattaaatgggttcttgatgtacgtctaagaccggcgaagtgctagtaggattgggtataaattatatggtgtaatagaaacggtcgaatataagaagataagaaaggagaggttgataagaatgagaatgtatataatgtaagacggtataatataaatgagagagttataagaccgaggactacgctgtagattgcctctggtattgttagaaaacgagtgatggtaaaataagttatttcagtgaaaagtccagaaatttatttatctactttggcatgtactagggttggatttataggtctttatcttcctatttgcttctttcctggcggtacttaagaatcataatacagcgggccttagccagttatgattggtagaaaatcaagtgtataatcaaatccctgtacccctaagttgtaatggtgctagcttgggctagttcctgtcttagctttttgtggggcgagaagtggagaaagtccgcgacgctacttttgtgtccgcgattctactttcgtgcccgcgactctactttcgtgtctgcgactctactcttgtgtctgcggctctacttttgtgtctgcggctgtacttttgtttccgcgaccctacttgcgtctgtgtaattctgccgttttcgagcgcctagagctttagcctacttcttaaggatgaacgtgaaattaaccttaccatagtactcactagcccattcctactgtggcttcggaaatcatcgataactctggacaaaatgtaattcgcttataccctaggcaaatggcctatgtctgctggagagctattataataaagataaagtaggccagcatgccctctttgccatcggtgggagaaaaaaaaagccttagctaatcttactatggtgaagatgtcttaacctaatgggttaaatagttccttcctaatagctaccgctgagaatgatcctagctgcgaattggaaagtctcagctataataggtatattcctaagatataagtttttctatcatactttctactaagatcttgatgttaaaatcctatctaggtatggtttaccctaccttgggcatccttcctaaaagtattctttgaattggaagattaatcaggctggttatagatggctaagccttagtaactactttgggtactcaaccgtcttgattaaaagaagagatgccggtagatagggcgctagcttctctaaactgtaagttatattatatgaaaatgtagtgggcctagtggaggctttctatgatggtatatctacttactttatttataattactatggtttcgctgttaatcttatataagtcggcttaactcctactttagaattaagtgagaaagatctggcgagtatctatagaagtgttcttaggggccttaaatatatctatgagtagctctatatagtctacgggggcgtcaactatgataatattatcctatgctccgatagagctattaagataggtaagttatatataatattatcctttatagatagaatactaagcctactagtaaatattggggatagtatgattaatgatggtcctatgtctatggatcttgatcgtgaaaatattggcttactattactttaattaggtgatttatatagatatatgaaaaatcctgaaaaaatccctggaaaagctgcctataggctgttgaagtatacagctcactttatagagtatattggcttatcattatatttatatatatttgaggttcggctactatttaatatcatttagtctcacactaataacatatagcatacattcttttagcaagtggaatcagacagtcggacttagtatcttatacctcattatctggatacaatcatatactgggggtttatgacacaagaaacggagacctgagcgagactatggttctctttctaattcatcacttgcagccaaggcagaaaattgtaggactctcgttgttaccaagctttttgctattagttgaatacagtttgtactagagaatttgatgccatgccttatcctttacacattcctagccgttacccctgggataacataatatagaggaagattaactcttagacatagaggggttgtttgttgcgaaacatcagattatattcttatttcaatctctctagtttaccaaatttataaataaatagtaaaatgagggagtaggcaacggataggctaaaggtaatcacagtcaaaagcactatgatagaccaatcgccattataagtagtatataggctgataattgtagcgagaaagccagctaaggtattaagaagcgtaggactagtataattagggaagttcttatataatgaatagataatacttatataaagattcgattggtaagctaaatataattcccccgatattcctagaatagccagcttataatagccaagcctgatataaacagtatatatactgttgcgagaaggggaggattctgaatagtatttaaaatccactcccctactttattatcagtgaggctattatagatggtatcggacttttggagagatgtgaacgttctaggtattataagatatctagtaagaagtatccagtgtactgtactagtaagaacgttgtcttgctaggaaattccgtccgcttctatgattatccgcatgtaactggattcgaagggctcgtaagtcgaaccaatgacttgagtatccggatgactaggggactgagtcgccatgttcgtatttgtaagctagataggctgtaaaatggagggtagcctttggtccttaagaaaacctgcgacatctaaaacagctcgcaagagattatgtcaactggagcttgacttattttcacaaaagcaaagtataatctgacgcaaagggtacgcaccatctattctcccctctacattgtactaactttcgttccgcttgattgaattagtaaataaacggtgaaggtaggatcttccgagtaactacaaaatcttagcagatattttgtcgcattataaaaggaagtatattctattaatcacattcaccagacttgatctgtagagcctctttatcagcaataacatttgctgggtctatatccctatagagatcttctaataatcgaaaatgctccaatctggtggcgaaatatcgagtaagccgagataaattactctcggggctttccggcaggccttctattttgctgaaatttgttcgttctagattgggatactgctgttcctactagtctcttagcttaatggcgccgaaaccctaagcctctttaggcattgtgttacttactagctgtttatcattagggggccacgatctatcctcgactgagttatagataaacgacccttactgatgattgaagaccaggtagatatctgtattatagaacttggtaagcttataagctttagcttttaatgtctgggactgccttatgaatttaactcgggagttcctgtaaggatcggggccacctatgactttaatatcatttagtaaaagaatctagaataaggaaaggggtaacgaaactttataagttatagaagttataagtttttactatagacaaaaaaggacttgtatttatacctaagagtttctttatcgaatacgccataaatacattctaggtttaatcctagtttaaataagtgcgcgtttcctgggataaatatctctagagcctcttaattcgcgcttatatctcctacccctaataggatttcggatcacgtcacagctctggtaaggttatcggtaggaatacctatagttgtcttaactaaacgaagaccataggccttattataaaataaacgatattatactctctaggaagccgctaatcctttagtgccttttagagctagtctataaatatatatttaccttatactctagatagtgggctaagaaagtaacggagcggctgtagtatctatataaggggtagagactatctagacccctaaacctatcgattaatctataatctaagatatagctaagcctattagggtagagattttctaaagctaagattactatctaagccggccctttataatatactaatccgcgatactagaatagagttacggtattttctagtaataagtcgataataaagaagaatctagagataagtagtgtagttactatatcctaggctattcgtctactactaatatagaggataataagatcgcgatagtcctctatagccttaatagcgttaatagtataaggtatatttcctaaaggtatatctaggcggtaactattacttttaatagaattatctagatagcttcgctattttctctaatcgctatctgtctctatagttaatatctatatatcaaatccccggtatacaaaactattataaaagatatagtagaaatatagggtttacttattagactgcgcttttctagtacctaataatagtattcttatagaccctatagctataggctagatttagtatgagacctaatatataatctctcttataaagttatactttagtctactgtcctagaaggaaccgattccctatagatccgctagcgtaaaaaaacttataacctaatggttagccctacttgtataaaataatatataagatcgacttataatagagccgcggcggtagctcttactctagattttagttagcgcttaactatagaaaatagggtatatactaagcttaggcctatattcgctatatagttagtttattttaagtattatatagatatattatttagaagtctagttatattagtaaaaacataggtagatataattattaaacttgctatttttattccctaaatcattggctacattgaagttacctattataaaagtacttatatccctggaaatgcttgtggttactaccctgacctttgggctggagtatcgtggtcctagtagatcttcttaagtagtactaaaaatataataatactctctaaaggtactttttagggcagtatcgaagacctgtgaatcatagcagctattatataggagctatttaacctatttagctatatccctaaagatggatataaatctaaatacttagcgaagtagtagaggtaagatagaggggtgtcttttatagaaaatacgatataccaaggtattgaatcgctccgagtaatatgtaatgtcctatattattataaataaactaagggcaataaggctacctataatatcctttattaggtttcctgattctaaaaaactatatttatactataaggttactaatttacctaaacttatactaagtataagatctactatatcttatattatatataggtatagatattcctatactaaaagtaggaactctaatagaattaccccccttattctactactattaatagtaaggattatagggcttatagtcggtagaagaatatctactactaatagcctctagtagaggtaataaagatagcccttaattataaactaatactctagcctaggggtagggtttccgaaaacctaagtatagcggttatatactatatatctatatactagaatatattatatagaacgcagaaggtagactagataaatacaattgctttgtatataatataactaactactaaaagacttaagttcttctttatataaattcgctaaggagactgtattctctaagaatcgcttatataagtgtgaaaaataaaacttaactagatcagtttcttttataggatatacattaggctatagtaccttagaacagcgatatattataataataatagaccaatataaagttctaaatactatataggggttaatgactttctaatattagctttagcctatgaaatattaagataggactaactaagtatcttaggtatatagtagtctataaaaagtgtagacgaaattgtggtagctaatctagagagagagagattggtatagtagctagtcttaagataatacgctaaatatagctctatatataaactaatagggcgatccttccttatagcttttataaaatcgaacggataagaaatatcctttagtatatattagattactgcttgaaataatgctattaaatacatcctattcagctaagcttagttttcttattaaatagaggaaatggtatcgatctattctgtgattaatactttgatttattagaatcttatgatattagagaaattattatcttataggtataaagatatagagctagagaataatccagatagattgttatatctactttcttagattttccggtagagtaatcctatactaggcatacccctctcttcttttattatagatacgctatgaataaatattacccttagtaaatattgtgataaaaaggaggatatagaataaagctataaatagctgataagaaagtatatgacctttttaagataggcagtattattaataaagatataaactatatctataaagataaatattaactgtaaccatagtactagcagtattttagccgctaaatagttattctaaggaatgggatggctaacgctagtattaagtctctttatagggtataatttattggtatttaggatattactattagctaataatactggccggcggctttacaaagaagcgatattatatcgcagttttattagagcctcagatttatacctttttatattattcagaggatagagctattaaagagtgtgattcttggttttcctgctaaggaatatatataatgatggatattggttatcttagttatataacttagagaccacacatcgcagccggctgttatcctagattgtaagtgtggaatcttcctaggtgctaacatcaagccagccaatatctatcgagttttacattgtgaagtaaaaataaagaatctacgtctcttatgccttacggtacgaaatatttatatataaatattactccttcatatgacggacgtgtttcataactagggtgataatatagcccatatttacagtaaataaccaaacaacctcgttctcacctcatcttcaccccagtcctcacctcattctcacctcgttctcaccctgacccacatttactggtatagatcccagactacgtacttttgtcaaggccagctctcgcctccccaagtccaagaggcaaaagtcaaatagggataacaacaacagggtactataaccaataaaaagctcccattaaccaacagttggtggccctatcctagtcattagaagtctggcgcttaagagcagagctagatataagacccatctgcagcgtccgagactaatttttattttactaccttgccctaaacatatctaattacaagcacgatcatgactacgaagcgtctctggcactcaatgtcccagatagtccgtgggagacccataatccctttctttatcttggcaccaacgaaaacatgcattgcacacaagcagacattgactcatacaacgcattgagtgctttcgttcagcagcaggatatgattatggggaatgacggttttgagtctaaagcgtgcccggaatcgtctagggtctcttcaatgacagagttatacaggggtgggtacgagtatgggataaggtatccttccccccatgataggtcccaactagagctgacaaactagcagccaagctgatgcattattatcctcatcttcaagttgtccacaaggccccggggagattgagactatctcgcatacagatgaagccctatctgtcactctgaagcgatttacgagtacgataaatcaattcggtgcactttcgcaaacgcttggtaacaagatcgaaggcctaaatagccgcttcgacgatatggagcgccgtctggacagtatggagaaccgcatggacagtatgaagcagagcatggacagtatgaagcacagcatggataatttgtctcaggaaacggaaagcttggaggccaagttcaaatctgtcaatgagtatctgctcgaggtcataaggcgggaacagagggtaatgaaggaatttagtgacttggcaagtcgctaccaagagcaagaaatataacaggttacctagcacattgcaaattctataatatgcgttggtattttctgaaagagatgaaaagaagcccaacactataataagacagcactcggtagattccacagcttaagttccttcacgtccaacccataacctgaaacatttgacaagtcaaaaacagcccccagctccacttctagaattggatccccaaagcattaggtattgctgctccgactcgtgcaggcgcgcggttgcctgtgtgagggcgtcttctagggagctgaagatatcaaacacccgttcttggaactgcaagagtatctgtttggtctctttatgccactgaagctctgctctgagatagcccatctcataagcagtttcttccaactgggtcttgaaatctggcgattgtcgctttacacattgcaaccgggactgtagtctctcgaggttagacgatgtgcctccaagacatagaatttgatggtccacgggagtaatctcctcggatatgggatcgagacgttggccagtatatcgactcattgtatttgataaaaaatgcaatcaggactatagataaagagtttcgccctttaggttggtacagaaatattaaagagatcaaaggaggcttacagcgggaggcaatgccattcctaaaaggacgatattgacaatgccctctatcaccccttaacgcaagcggaggtgataattgacagggcaatataacgccacctacgacacaaaatatgcctcaacgtatatgccagtgcatcgatttcaatacccgcctaggttccccactctatagctgtatagatttagattaatttcaccacgtgattttatccaataatatgcgagtgttatagttaggatcgacaaatgaaaatacctccatagatgcacaacagcaacggctttatcgatagatacaaggatagcaaccaaactatcactttcttgatattagaaaagaagagatgatttacagttgacttatcaatcaggccgacacagtgtaactagccggaattttgggcctcatttacaggcgtcataaggcacgcaatatcgttcgttgccgtgcacatccgtatatccacctcgcaccaacccatggcgcaccgcgcttgccaagacctgcgagtctctccgtgcgacagtaaaaacaagatacgacactgaaaacgacaaaagacttacaacactgaagacaacttgcgacactaaaaacaacttacgacactgaaaacaacttgcgacaccgaccaattcctgcgacactgaatgctgtaaataccatggttagctgtgtatcgtcacaccctacattgtttagccactaataaaggaaacgagccctcaggtctttattatatgataaaggccaagccaattcttcaagacatatcttctaaagcccaatatcaaaatccagtggtagctccgccatctactactgccattcttcgagtaaagccgactttttatccacagtagatataacatttgctgattctgtttcaaaaatctaggacaatacaaacaccgcaaaatataacaatgacgtctttgtcttggtagagaagctgttacaccaagaccagtagtcaaagcattaccaggggctcttggagctcaggatcaacagcaattccgtggcattccgcagtatatatgacatttgctgattctgtttcaaaaatctaggacgataccaacaccgcaaaatatgacgataacgtctttgtcttggtagagaagctgttgcgccaagaccagcagtcaaagcattaccaggggctcttggagctcaggatcaacagcgattccgtggcatatcaaaaattacatgtctattgcgaaaggtcgctttctgggatgcagcatcaaaaatcgcagcttgaggcttcactacgtcatgccacggaaacctgtcaagcgttgtcccaaagccttcacttagaaagggacaaagtgcgagggctcgagtcccgtctcaatgagttgtacccagctgttaattcatggctacagcgattgagtcaatacaagcaggagtccggatgtgtcggtgatgagggaacaatggagcgctttctgctagagaaccaacgtcagcgagagttgatcaattgtcttcagtctctcctccacgcacgtgaacaggctgtgcaagaccttcaggctactctagaccagttgtctcaacaacccctcaaagggaacgcaggtcaaggtgggctatttaggtcctctgtttgttcgtcggaagaatcgaatgtcgaaatcatcacggatacaccttccaccaagggctgaggtattagacaaaggattttgcgtgctgcgccaggttcctcaatttcatttcctccgagtttacataagaatattcttttccgtcactagtaactagcctaagtaaaggtctcaaccaaaaacgagtgctgcgtctgtagcgctatatatacacctctggatgcgaagggaccacatctcgagtcagttcgtggtagacaaagttgtggcgttcaacattccgtgttccccgaaagtgaaactaggacagatcaggcagccttatagcgatcactacctaaacgaagatcactacctaaatggaggaccagaagctgccggcccattccgaacctttcattacaatgacgtcctgcctccaaccattccccggcacattggatggtagatcaaatgttaagaaataaatctttctttcgcctccttttcttcctgggcttttccctgttcctcaaagaaactcaatcatggtgacataagctgtatgcatgcatatcactaagacggatcgaaccgctcgaaccgagctttattaaagttttacacccctggcgatcctaaaggggtaatcccggccacttaattagaaccttattgcgctaacggtcccagtcaccaacggcgcgtaaaattccgctcacattggatattgcaactatttaggttaaatccgattttgtttcttgtccgaaaacgtatggatggacccataacgcgctgcgtctgaggcatccgcccattgcctagtaattcgcccacggttcaaaatacagtcacgacaaccgagtggaggtacgcacttgaggtccgttcgtgatttctccgactacgagctcgttgctttaattctcaggtcggccgaggcgcctcgtgattcttgcactctcttacccattacctgcagggatcgactgcagagctcagacctctgtcctcagtagccagtatccatcgacgggctcgactgtaggcacgaaccaaaccaggtcaaggtctatagaaattttgccgcggctctgagacagtgtcgcggccggggtgggagagcaattgtaaaggtcggcggcaacactctggtagccagaccggggtactagaaacagtgtcgcaactctttcctacattattttaccacagagtcccagctacacgggagttaatacttatttcaccctagggcaggtacaatctttttttgcgctcttcgataagttatatcaaggctctccaagctttgaagtaacatgacaattttcgcggatctacctttcgagctactaaaattgattgttatcgagcttgacctcgattactactccttgagatcgttttcgcttgtgaatagaagatgcagatcggtcagcaccttagatatcttctatatattcaaagtcgagttcacagaaaaagggataaagaagctaaaagggctcgcaatttctttattagtataatgcgtaagagtacttcattatgatacattagaattggtcgacctatatatatgattgttcagctctttatctggctccttactgatcctttcagtaatcctatattgggactatttttctgcttatatttatataccataggagtatacaagagattaggaagatttccggtaggagctccgaggaaagcaattttcctataaggcaatatttcgatattttaaaggacttacaagagcttagagtttactcttgaaagagcggacggatatctatatatttacagaattacttcggtatctctctaatctaaatactattaagctctccttctatagagtaaaggaagatcagcttctttggttctttaatcgagtatttcttagagacttacttttcgtttaccttaaggcagtacttaggggtatggctgttactcagtctataggattaaccttaaaatgtataaagattaataggatatattctaaactggctactaaagataataatatcctagaaattgtaaaggctgctttagcaaaagttgagagcttaacgctaatagaaagcccggggtttctagggtttgtatcctctgtccctttaccttccttacggcggcttgaattagcaaagtattggcttataggctttaacttaagaaagttcctgaaagcctaagatgggagagtgctatatacatatttcaaagatagaaatcaattgtattatgaaatatggaatatggatggcgagtctgagctcaaaactttgtctgagtcctttatctgctctaggaatattggcctacaagaatgtcttgtacttacaggagatcgtatatgatcgcacaatttcaatgagtcttttacacactctccagaagaatgttcacgaataatccctgagaagttagaacagttatattgcgtcccgaaactggtgtcactacctacactcttcgattggttctcggactctaatgccaagatataccattggtatacagtgacggtgcataagtttgaacaccctaatactgcccgccctaacctcacccaatcaaatatttaaaaggttgatcggcatgattgtttaagggctatttggttaggcggtgtgtttctcttggaaggcggtaaccaaaggggtgctcaaattatgcatcgtcactgtagttccggaatatcacttcatgtattgttaccgtacagtgtaaatgttatcgaaggtttcatagaagtaaacaagtcaaacatgagctggggccttgaggattcagtaacgtgtcacttcatctgtgtacttgggttaaaactaaatgcatacctcctaagactgcggcacctaaaacgggtcgcagaggaagtagcaatatataaagcagctgagccgttctatcattgacacctgatttcgaccgagatggatgaacaaattcagcttccgggtaataaaaagtgggcttcttggcgcttaacttgctgaacgcgacttgcttagcatatatgtaagctccacagattttttaaaattaaacctactaatatctctgactagttgagaggcttgatcttaaagtagacccttccgaggtccgattaaagacagaggacgaatgtctctatatatggcagatagatgatctatcgcttgagcctctttttcagaagtatatgagtaaatactcggtgggggcctacatacagcttcactgcgaggtaggtcaaacgttttatacagttcctgcaaaggtaaacttaataaccctttaggataattcattgaacttataagggttcttatagcgcgaaaagcaaacggaccttgaaaatgttgcttgtatataatttgaaaacctcagtcttatagagaaacttagggcagccgaagacaaagcatctcgcttcgaggaggcggcaaaacaagcggaagccgagataaaagatcagaattcagtcatttaggaagcgcaaatgaccattcatctttactagcaggacattttgaactggatggccgttgccgagtggtatcagaccaaatgtttgcagtgctcgagtgtattagggcaaatgatggctttcttataagacactacatctgagaccaagtgagaatcgctgttggagcttcatatttcgttgaggtacttttctatagtcttatcttgaatttaaagctttactgccatcagaagttttaagatagttccagctcgtgtgccagactaggccagaatggacaaaaatatgctataacacaattccttttcaaactggtagcccaattactatagaaatttggggatgaagtctctcacgaaacaatttgtgcatgcatcatcgtccttcgcagcatattttctggcctgcagcatagctttcaccctgcatcattatttctggcctgcagcatactttctggcccgcagcatactttctggcctgcagcatgatttctggcctatagcatagttttcaccctgcagcattgattttgaaatacgtataatcaccaccgcgggcttgaaatataaattgagtcttttttctccgaatacagggaagttgactaggcttcaagaatcaatatggttaaaaagtcgagaaagaaggcccaaaaggcccagcgaaatgcccgtgatatccaaacacccgcacccacggaagtgagctcagactccgaatcccatcaacctgaatcctcgagagcacaagaattgaggcaagagcatagctaaaataagaagggcaaagctcccgaacggaaggcgagatttgttagaagcctaatactcctagatgactttgccctaaatatgggtgaccatgagtcaaatgacgaaacggatagcgaactcggggatacttctgattaagatgctctaattaagtataagctagacctactaagtcgctgggttaaggatatcattcgcagcgagatatcacaagagtcggaaagaatggttaaggagttcttcacatccccaagccctcagtacgaaagatatcaacaattcttttaaagactaaaccaatacattcggggcgttaataaagaccacaatatcaccgaccttaataccggtatcatccccgagtctggctacaataccctatataagacctagtaggaagaagtaagtaaggtagtagtaaaaggctccttagaggagttttaggtagcttataataagacacgcgctcttctaaagatctttaataaaagatattatcttcctaagaactagaatatcagtcaagtataggccgagcaatagatcggggcaacaaatcctaatattatagaagataccgactctacttccgatagtggcgagagttagcccgactagactcgccagcccttagctagtaaaaagtctagtgccgaatcggatattaatatcgacggtaattagcctataggacttaataccctagaagcgagaaccataaaatagtaataccaattgtactcggctaaagtattatattagtggcctaaaggtactagctctcagatctttatacgctacggaagccggtctatgccgatctatcgtattcaggctagattatataagagctataacccaagtcgggttaaacgtgttttaaccacgaagactcgcggcaccgctaaagtaaccgggataaggaacgggcttcctgaggagttttagaaataccagcgaaaggacgtggaggacttcattggcatcggttggaagatcgaagacgatgatgagtaggggcttaatcctcttaatctactgctacctgctaaaggcatagtatatccacaaactcggatacttgtcaaatagaaagacggttagtttactttagaagggcgaacctttatctattatattatagttggctctgccttggatggtgatagagtgatttatcagaaagccgaggagctcgaggatacttatcgcagaaagcatggcttagacgatattgatgaagattatgatagtgaagttagcgagcctatacgctactcgaaccaacgcagatcaaagacgaggaatcactttgaggccagtgaaagtagcgacgatgggagcgacgcctctattcagtcaagtcacaaccacaacagaagataccgcagtgagccagctcgtggcccagccttatctatatagagatgaaaatcagcttataagatgagaaaggactcggtaatagagataaaagagcttgagtattagattcggctcctgaagatgcgcagcccgatacccactcaagaaacgcaagaatcgcaacggagacgacgccgaggtgaccgtgggcgcatagcataataagcacttgtgattttatacgttcctttagtcttgttatgagccggtgttaagccgaattttttgctttcgtattgtttctgatgagctggcctcacatattgctttcagtcttattttatagtttagcttagcttagaaattgccagacttgccttattttctgaacgattgcatcttcccatagtcctcttctatctattatgcttacgcattaaccactatgggcttccttatgaacttttaccatccatttctgcattccatttataaatgatgatacaatgttttctcgattggttctccacctgtatcgcatccctgttaccgttaaacaatatcgatagagagacatctatcctagaccggagagtttaattgctcgacgtaagtgggcttgacatccaaccatacaatgctactcaccagtgtcctatcaagtgccggggctatgtcagacactgttagtcttaggtataaagttcttcccctagcccgttgcttactgtaatattttctttttctcttcctacacccgtctggattaacattcctccgatgtaaacaccgggccacgatggcaagccattccaacactattattatagccgatgacgaggaactgccaaatctccagccaggtagctcacgacctcggagggcacctcgctataattacagctacgaagattccgagagcatgtttatcgatgcagccgataatgagactcgatcgcggaaacgcaaaagaaccgaaaagaagaagccgtctgctttggtacttgttcctcacaccctcttcttcgtccttatctaataattcattaggacaacgctttccagctgcttaacaaggaagtccgccataaagtaaaacggttgaaaaaggaaaatcgaatgcgtcaagatgaacttagccaggagaaggagaggtaccaaaaggcgcaagtggatctttccagggaaagagaaaggcgtgttttggagtgcaagatctgttatatgcaaccagatcactgggtgacaattctatgtgggcacatggtttgcgagtcgtgcgcggaaaagctcgaaaccccaaagagttgtcctatctgccgagcaccatccacaggacatatcaaatgcctaccctttgcgggataaaccatgtatatcatgttctggattatctggactaagaagcgtctattttgccgcaaaagcatactgcaggatgcgaatatggaacaactaatttccaaatgatcgagacgccgtcacggtcaaattactttcaaatcaaacttagctagacatgctctcggtattgaatctggaaaggtaagcgcgccgtatttactatggaccgcaaaaaaccttgatgcaagtattctctgggatggataggggaaatgggaaagaaaaccattggttgcattagctaactaagagagaggagtatcaaacactagggtttcttagaagactatctcaacaattcaagaatatcgtatttgttaaacttctctccaagacatggaattaagatcaatggttctgcgcctccgatagggggtggattcaaccatccaccttgctcttagtacctctcatccaagctatcaataagaaccggttcgaggtcatcgttgtactttcagtgtacatcatgtggaagctctatctcatcaaattcaatttgataatagtggttcttctcgagcaatatatatcctctttcgcaaattctcattctgcgctattctcttcagataattttcggcctgcttttgttgaaggctggtctcgggggaatccggatcagatgtttcaccgaggaagaccgatgtattatcgtcgtcgtcaaacttgaaaatttgaccgggtcgagatagatatagcagaagatcgtggatctgcctatctccggatggtggcatttgtaaagtattccgcattatagcggcaaaaaaaaaaagaaatcctaacagtttctgatattcctagcagggagttcgagaactaggagatggttttctttattgacgatggcatcaggtgcggagattgaacgatatctaagaacttgtccacgtgacctgggtctgctgacatggatcaatgtctgatacgaatcactcgacgttaggacggaactacttcccatcagaaattgcattcgtaaatacgggaatatcaatattccgataccacttttgatatggattagcgtgtctttgggcagatcatctggtgcattaattcaggtgctagttacatgcggtgttgccagaggttcctctgctcttcgaagtccaggccttgctgcactttgtctcttatgcacacgaaattttacagaaaaatttcatggcaaagtttgtttgtaaaaatgggtttggagttcgtaaaagcactccatttgggcctcaaaccagttgatacagcgttggtcatttagaatattgactgaacccgctgctatagtgtatttggttatcatttcacttaaagcatgaaacgcggtctcagcatacgaacgaccgaactcggcagcaaaaagtgaatcggagtttaacaaccgtaaatggctcagatcggtgtggtgggatttgactcgtctaacaatagcttggtccactgctaggtcaaactgacctttgccaagtggaatagcaatgaaaaccttgctatcctcccctggcggaatatccgtggtgaaatgagcgagggcaccatatacgtcggattgttggttgcaaagatcgcatttaaaattagattagatacgcatagtctatgtggttggctttagtaacattctggtaggtaaggaggatatacactgacttggagtggttccatttgaaagaacttatgtgctagtctctgctagcgtgattggaacccttggtgttcggcagaaccctgatttttctgaggtggtaagtagcttcttataggggagaaacctgattgtaagcaataaacggacaccgccaataacgcacaaaaatgtccaaaggtcatatcgtcctaaaacagtatagctcagaatgcatgccctacaaagacattattccatccccagaccttaactagcgttgttactcgttaaatctgtcaaggccattcggtatgtcggttgatttagccagtaaccacaagcggtattgaggtggcgatatgaaatgtggcaattcagctgcaaatttgggtactaagaacgcgaccctatgtccagaagtagtatagctcagaatgtatgccctctttccactatatccccatttaatccgtgttggtcaccgagtatgccgtgcattatgacgctgtgttccttatcgccacgtaggtccaaattcttctagcgccttccttataccattactctttccgattttctcatatttgtaccacccctttatttgcttcccttgtgactcaactacaacacgtagatttgcttcgctcaaagccaaagctcccggatactcgatagacaaaaccttggtaacatttccctttggtggcgcgggatcacttgcttctccatgcggcgaagcgctaagacctccgctgaggcgcattggatcttctccttgaatagatactccaccataatgaagtctcatgtctggcgggctacttggctgtccttgtatgttcggagggtagatcttgcccggttgagtctcaatgttccccaagggaagggaatccggtagttctgttgggtaatcttcagtgtcggcctaagcagttagtcaatttgttttaatctgctaaacagagtttgcccataccttcgagaccccgaaacacaccattagtagcgtaaagatattaagccttgacacggatcggttcgcaaagatgtttgctatagttgatgggtagtatatggatccccggttctctggcaagtatagcttatatattggagccattatcacaaagatacccatttcaggggcatgcatctactatcatagagcctaggcgggtctatgttctgagtaaccaactaaccctgcggggatgcattctatgctatacccatttggtcaccttctaggtttctgagtcagcggcaggggggacttaaccgacctgagcgactcccactttcacgtattgacaatgccagttcgccgcaatccaccagtcactgcggagggtctgcttcacgacctatccattcagatagaacatttttcaaggtttttggaagccgacctctctccagctattgcggaaaccagcacagccgtggattttatttcacgtggtgcgagttcacgctcatggatcgtgcgcctacaaaccatccttcgatggtcttctctagccttagaagaggaagaatggctacagacgtaaggattagagcgtgcatatcctaagagacaggtccgcggtgtctagtcgataccgtctttccttcgttacctagggcggttaagcgatcataatgcttatagtgctcttcaataggggcgaaagcttagaaggtttaagattgagtttagtgagggaattacacttctattcgccccggtcttacctactttccgccgattatctcttatcgaagaagctaaagccatacagcttctaagagctagccatactaatattcttattgatacacaacgacttctatattttaagtctaggtatcaggcattggtagtaactcatatcctttattatatcttataactaacacaattctttatctaggttctgcgtctaatactaccgattccctaggacgcgagctgcctaaaccgttatgaattcaaaaacctctggcccgtacatatcaggccccattagtgcgccagtgctcccttactagacaaaggagcctccagtaggaacctctatctccattctaaccgatccttttacgaaaaggatttcgttcggccgtagcttccgcttaactggttggctttcccgcgtttcctctttcgttaaatcctataggtatagcatgaaagtcactctgatttcgtcgatattcgaaagatcccgaaagacagataccgcaggatgagatgggtgcgcaagcctggtgccccatgagtgtttttcggaggagataacgataacggggccttaacgacaggtaaagccaacttcgcctatagcctccttgattttccgagtgaacttctatttatcagccttagtttaatatactctttggcaaacctactacgtcgctttcctcggtcccacgccgcaaaaaccgcgcacatgtgtcagcatctcccctaccatagaccaaaggggctttttctacctttggccataagtgtagagaccgcttcacttcggaatttatgtcggctccgtcagaggaagctgaaaacaccacaaagcccgtgatctccattccggatagctcattgtaacgaggcgatctgttctacgctgttgtcatgtttgcgtccctgtaataggcctaaacagtctagcttgatagagaatagtcgcaattgaaactgggaggagggatagaaaggcaagacaacgagacatggagctttatatatttggcatgtttgaatcgagatgattctagttgcatttctcgatatgaatctggataaaactagcaaacacaagtattgaccctgagagttgtccggaaactcatttccccactgggtttttccactccactagcgtaaatacgagaggttcgtagtttatctatagtagcctgacttgtaagaagaccatagtactcgacatagaaaccgcattttaaatgcataatcgtccccattaagacgcctagtctacgccataaccgaatctgcggggtcggccgccacctaagaaagccctagctctgaagagcctatagctgcttagttaagcgtgagatagtatgacctcggggactaattaatatccaaaatccaaacaggaagaacagactgctgcattgaaaactagtaaaggaaagctttgttaaggtcatctgagcaaacaaccgcctagtcggccggcaacagtaggcatacccggggattgaatgagcttcgggtacatattttgggcaccaacctgattgagtacaatgaccaatgctaccctatcctttgaaagtctctagagcttctgtcaccaactttagactggctttcctcgcttgaactttaatgctaaccactccgacagtcttattcaacccttgaattgtttggatcttctgagcagcaacctcttccaaccatgctttatcgctttgcaaacgttgtatatcactattggagcattcgcctaagaggagcaaatcatatatacaactcttagagcacgctctaccgacgatcgtgatcaaaagatcctcagagagtatacagcctgagaggagcaaatcatatgtacgactcttggagcacgctctaccgacgaccgtgatcaaaagatcctcagagagtgtgcggcccgtgcggcccgtgccgtcccttccatatcccggaggcgggtgttgtataaggaattcaaatatttcagcgctctcccgctccactttgtcggcagctgcagatacagcttagcgccagtcgtcgtggctttcggtatggttcgagatccacacgactccggccacgcagttgcgtctcgccgcataagtcaagaggtcttctgggatctcttcgtcatggctccagaaccaacctaacatcggttcagggttttgttagtataaaagctgataccaattcggaagtccgttatttggattggggattctaagatccacacctcggtgtagcagctgatttgctagatctatatcggcaaatttgcacagattcattatctccgttagcccaagagttaattcaatttcaggtattgatcgaagacgtttccagcagctctagaacaactgggcatcctaggtagtgaattgtaatatcgtcatgtgtccctctaccgagatagatttgaggaggtcgaggggctctatcgcagacattgtccgctctatcaaatcagggttctttgaatttgccgcaatcagatagagggtttgcccatcccgataaaaagaggagggacgaattgtttgataatcgagtagaaacataaagcactgaggacaatcgacgattgcttttaaggctaaatcatgcggagcggttttatcgaaagtacgctgacgagtcttcgtatggtcaaagtcagggtagagttcccaactagtctcaaatctcttccgaagcgaaagtcttctaagaacagtgtgaatcctagttttgaagatagagtccttctcctcctggcaaaaagcttgtagagtatataaggtattatgtgatctaagcggcttagaaaaaatattagccttaataatggaatctataagccttattagcaatttttcgattctcctaaggatactgtctctagagaagactctgcattctctatgcctttatagacagcagtatttactcaagggtctggcatttgccaaaagttgatgatttttggaacctcgatgtttggaagctcgagtatgctgtctgattcggcgtcctctataccttatagtgagcgagaatactatcattgcgcgtatttgtgcaacttacgattttcttgatctccccagactgacgagggattgtcttgaaagaaaaaaggaccaacccacttcggcagtaggctttgtagcgtgagtatagggaaacaatccatgggccttttttgttgcagttatctagaggcatgaatacaatcaaaatagaagagaagctcatttatgtttatatgctcactaactatagcagtacggtttgatataggaaaatatatccgccacttgtccaatggtaggctataattgacaaagagccagaccttcttaccgagctaatatttcagattttatagatcttgtaactaaacagacaatttaccttgaccctaaagggcttgctatgtcgagcttcttctgtctatcccaatctttgcctgaaccatatgtgagctatggtatggaaatatttagaagtaactagtaaactggaatgtactaggaaatttagtatggaaggaatcgaaagaaataataaagtatcagaatacggaaggaaatcaattattatataataaaatacagagtgtaggtactaaagatagaagtaaaaaaggttgtattaggggaagagagagctctctatctaactatctaactaactatcataagggtgcttaactagggcaccgaggcatccacagcatttatgccacgtcgagcttcttctgtctatgccaatctttgcctgaaccatatatgagctatggcacggaaatatttagaagcaactagtaaactggaatatactaggaaatttagtatagaaggaatcgaaagaaataataaagtatcagaatacggaaggaaatcaattatcacacaataaaatacagagtataggtaccaaaggcagaagcaaaaaagattgtgttaggggaagagagagctctctatctacctatattactaactgccacaagggtgcgtaactagggcaccgaggcatccacagcatttaatattgctcatatacgtcaaatgggatgatatcctgtacgtgttgtggcagggatacatggctagagattggcataaaggcagactgcggagctgcggttctgatcgagaacgccctgggacgttagctgattttggatatatgagtggggaacttgtgcttacagataagaagtacttgatgtactctgggttgggcttgattatcacttcgtcagtcattaagccatgaaagaagaatatatcacccactcgtatacgacaagtctcagccctccaatttgtggatcgtccgagatatcttggataacctctgaattctgaaatatagccgcgatggaatgagaatcattcacgggagtgagtgacccctcttcaagcctcactccagtgatagtttcttcgccccttattcttttgtcagataaattggctgtgctgccaggagtcaactcacagtggtgtgcctgttgcatcatattctcggtaacaaattacgaaaacacggcttacgtcggcccttaggccagataggccttggctaacattgatgatgctaattgtggacgatgaagacaaggaaataccggcaagtctctcttttaagggaaaataggaagtcttgctgcgagaataattatctgggaatgagacaatttatagatttctgtaggatcgcctaatttgataaagtaagcaacggagggggtctaattcgaaacctcaataatcaaggttcatacaatggagcgttggttgctttcaatggagatatgggactcgaacttatctcccaccgagcatggaaggccacacaactcataacgtgatccatcacatcatattcattgactagataatagtcctaaaagtacattctttctccattcatcggagaatcaacatctaactatgagctgaacaaatttcatacaaaaaacaaccatctgccctaggcgttcaatgattctactatctcaacggctcgaaatgcagtggccaaattcccatagtcgagctaacagagatatcatatccttcctagctggttctctaccccaatgtccaaattatccacaagatgacgcataaggtcctccccgttatgcgagtaaagtatacgcttgattgatatacgtagggaactgggcggcaggatatccatcatcagcagactgtatagcacgaccatacattccaagtccgtattaccagcatttaaccccattagattcttaataaacgtcggaggggcatatcctatataccgagaaagaataccggatagcagatcggtagtaatgggcccatcatcacacagggccgaagagacgatataagtagcgacatcgccgtattcaatcataaactaagggttatccatttcacggactgaatagttagttagatatctgctatgtattagatcaaagaaaaacatacagaattgacttataacccgtagcaattgcgcggtgaggggcttggtaggtattattggcgttattaacatagctaaggaaaagaggaggtaaaatgccatatgactggaatagttagtagaatagttacctaggaacggagacactttatagctttctacaggttcgcctaattgataaacataagcaactgttggggcttcttcaatataaatcgcacgaaaacagacttgggcgctaaacccgataaaaaaaatggcgagttcttgtaaagatgcaatcgactccaggaaattaaagggttatgatctataaagagcatgaaggagggaacacctttcctaaaagccttaagtgattatttaattggataattcctacgttactcagcaattttagagagctattgtatcgatattgccagtccaattaatgagttatcattcaaattcacaccaatttccttatagcttcacgtgctcatcaatggaagcgagaataagccctggctttcaaacctcaaggcttagccacacgacacttgccacatcgatgcctgaaattctgttttcttagtagcacttctcccattgtgcagagacctttggtaaccttatcggcacatggaaatggcagagccgtttccacgcattcacatccataagtataggtatattgaaagcacatgatacttcactataatctatattagcctccgtctatacaccttagattgatggtatcgcgaaccttaataataaaggcctatacaacggtgcgttgattgttttcaatagagatgtgaggctcggactatttgcaggcgaagcaattcagcacagagctaaacacatagctcgcgggctcttatacctaacttcaattgtagagaaataagaggcagaagtgcatagaatataaggataaaccaacaatagtgcaacggtaaagtaatcaatgaaaaatgttcctccttcaatccggatgtagggcaagggatatatataatacaagcgaagtttctcattccagaagcagagcttatgctgccaccaatagaacctcaatcaagcttgaatatcaaccaagtctgacttctcagcattactttggcggtggaggcgggacgcccagcttcttgacgcctgttgtaacgtataggccatgtatttcaagtcactgtcccgacacaatgaacagtccacgtatgatataaatagcaggtctcaagtacaattgatatatatttgtgattaagagatagaaaagtccatgttgaaatagtaatgaaataagcttgtgctatatgctggccgcagatttcgacgggagacatttgatatttaagcttgcggagaacggaagaactatctaccgctccccggagattatccgcctttcggagcgtcccaacgagccccgcgccacttctgcccaatatcatctttgcaagacccttaacgaccgtctccccttcatgtgagtaaccagagcatgttgcatcggctgtactgataaaacttcaatagatttcggtgcagttcaactacattcgcacttgctcctcgcaatccaagcgcatatctatggctacgaagggttcggatgacaacttggtggaatctttggcgataccttcatctatcaaagacatctacactgaggcttgcgaaaatgatcagtctctagcagaatccctatcaatcccttctgatcggatatccgccactatgctggtgcaaggcagggggagggaggtaatcgccaagattgaagagctctctttggtgaggatgcatgattcagcttcaatacaattgggttctgacttggaatagaataacccgattcgaaaagagcgccgattaaaccaatacggaataagacctgctctccaggttttctcctcaggtgtaaacatagttggccaaccttatatggcaattataccgttttacatcaagggaaaagtgacacttggcgaggaaacagttcagttggatcgctactatcatgtgtatggtgaaagtcgactggtgattgagaataacgcgaaattagggatttgggggtataaattgggaagttagcattatcgcctcattaagatacataaagttcctagtgagatcatagaccgagattgtgtagtggggcgatacgttcaaaatcaaagcaagacctttgggcaatatcatccataattccggaaatattaataggttggttggaaatttgttcatagaaaaggtgcgcaaattcggcctcgttacaatcctctggatttggcgattcggctccgttgctagggatatcaacgtttgcaaaccccatgttcgatggaaccgaatcttgcggaacagaagtatcgatacgtcggaacttctgtctccctgattccatctccgaaactcggctataacagaacatcacttaacaaaagtcagcatggagtaggttaactcttgagcgaagtcaactcacaatcgtaggaattttgcacttgactaaaccatgggctaaggtctcgtactagatcgagcagatgtatcttgctctgcaaaatcgtgacatatatgtcgtctgaaagtagtttgtccgcaaagcgatgcatttcatcatagcggaatcttcgaaattgatctatatgcagcccaacgatggcggaagttgcattgcatatgcttggcaaaccattttcttttaggcgttcggaaatgatcttctcaaaaaccatatgcttaagaccagctgataaggctttcgagaagaaactgttgttcccataattgaaaatattggtgttagaaggactcggagacaagatgtgttgataaatttcctcgagtttcgttggataaacttcattatctagctgctcgtttgtgaattccagagcaatcgatctcagtgcaagaagtctcaagagcttttcctcagggccaagtgttcgatctccttctaggcgccttatgtgctccaatcgaaggtcctcgtcacagcttcgcttgcgagatagtaggtgacttggtaacttttggccagcttcccaaacccaacttgctgattgctttattcgtttcaacaagtcagggacatggtctggtggtgaaagagcacgtatggactctgcgcgtatagcgctaccgggggagtctctggtcggtatcaactgggcggttggagcggaaacttgcaggctatcgaagtgaggtgtttgtggaaataagacgccttgatcgctgagtgccgtcgtttcagcaacttggaaaggttgaggtgaatgtgggggagatggcacgcttggggtttccttgggaaaatgatcggtgaacccagcagtctgaagaggttgaggagattttgaatttggcacgcctgcttggtctccgggttctgcaacttgatgaagttgaggtgaatgtggaggagatggcacgctttgcaggtcagtaagagtcgcctgaaaaccaggtgtcgagggtattaggttgtgctgaagacgttgaccgactctcctaagcgtcaaaatggtctgtgttgcatgcgagtgaagatcgctatcagatgcattgcgtattgtctccaaggctactagaaggtccattttgataagagaagagatgggatagttcaaaattacattctggagtcaggcttactctttagttttttaccatgagcttggacccacggtcgacactgcgaacttctggcgagccttaacctcagtcgagtgtccaacttcaaacgtggttcctaaatggtccccgctagctagaccagggttcggacccacattcgagtgttcaacatcgaaatgtgggtccgttttgatctatttgattagcttctacgtacgcgcaaggcgcggtaagtagttgaaagctgggccttcgcttgtgtaatcgttcgaacgagagcgattcgctaatcacaagattgcgcagtccgcctgcattatcacacgcctaatgtaggcgacctgcaagtgttcctcactccttagttgggggcggggccatttcattggacagccttgttcgaatacagtggagaatacgggcacacctagcctggccctaattggtatatcatatcaccaccgcgtgcggggttcgcactcgttcgtccaggaaatgatcggcagagtgcggagatacccaaattggagtgagttcgtcttcactatccctgccgtcctgtgggttgacaagattggacgaaagacgaaggaagatattgcaggcctctcctcttttttgacgtgtcagaatcagttctctattgacactaatgcctctattggagggattgaattgtcatacagcgtagtacattctggccaaccgctgttggtaatgtgggagaaaagcccgttcatttcaatttggtttgttatttgttcccacgcttatattaatatccagtctgtcacccctaagagggaaaaagctataaagccgttgaagattccttgtcaggtaacatcttctatcattactaccatcgctcttgctacacatcctcttgctacaaaccgccccgccgaaaagcccatactatcattgagaatcctcagtgacctcgtaccgtcgtcgaatatgaattgtccaaatcaagcttgcaaaaagggcaatgtgaccgggagaactcactgcgagttctgcggtaccgaactcccaggatcgatgtatcaacccattattttggaaatggtacgtctcgataatatcccggcagaacttcaattccaatctcataaatactagaggactaccattgcttgtgagcaggttggtacgaaccaactgtgaaaaaagatgatatctcggagtctgcgttttgcccgagacagtgccaatcattatttttactgtgaacaatttgtggaacaaagcaatggctctcttcgattcttaagtttctttctctggcaaactcgaaccacattcctttagaagtgccagtcctctctcatttaacttaggatagttgcgcaatgcaaagaaatccaaccaaaaattgcgggcctcagtatgatccggtagatgtgtacaaagcaagtctttccattctttatcatcttgccccagaccaattcccgcacaagtaaattcccaccaaacagggaaaaaggccgaagattcccagtctagaatccctgccagattaccattctcgacaatgatattgacgttggtcaggtcgccgtgagtaaaggtatagggagtcgcagctggcatccgctgacgtaatttcgaacgaacttgctccggaacttgagtcaaggccaacgacatctcagcccataattcatcgtcagatgaaaatggtccgtgtccaatcccatagccattcggaaaaagaaaggctgagtagattgggtgcccgccgatgctttccagtcggtccgagcgaagctcatgaagctgcatcaagtactcagcagtctgttttgcgacgcgttctttgtcggccgatgtcatctttggccaaatttcactcaatgtttgacctcgaatccgtttggtaaggagaaaactagccccgtcgtcttcttgccattcctcaacgatttgaggtataggaattgaggttcttgacgccaaaaacctgacattgggggcctcaaagttaggtgggtcggaagaccgttctttcaggatcaagtttgagcctaacgaccatacccctcgattgctgacaccgtagaagagattcacgtgactctggtaacgacatgcgtcttgacgtgttggagaccagctacacgctgaacaggtattttcggtggccattttgtaaagaaacgattttttctaaagggatgtcaaattttgggggagtcaggagcatcaaaggcttttatactgacggaaggaagggggcgatcggcgcgacagagtgatgtatcatacaggataatagtttatccgtaatattcccaattggcaataggttgatttattttccagcggagtggccccaggcgcgtaatagaatggccttggcacattatgccagtggatcttctaaagaacaacaaaggctccgagaagcggcagagtgccgccagggaaaagacgaatggcgactccagcccaacacactgtttggattttcgatcgctgccacatctctctgctcaagcgatccgacgtgagacggatacgaccctcacgactcagtgtagggcgaccgacccagtgaaccgattttgcccgcagcgcatagtccatttgaaacctgagaaaatctaattttggtgagtgctgcggtctcttgttgacgtgggggatattgtcatacttccagatgctaaaattagccagcggaaaccttgtcatttctcggggaatacttctaccggaaaccgtgatcagctgacatcagcctcccggatcaagcgcccgccaaccgagacctatacctatcgcgattgtctcaagggaccaacatcgatggctgacagcaactcgccagattataaggctctttttctgcaggcggaaaagagactcaaagaggccgaagagcaacaaaaacaggccgaagagcgacagaaacaggaacaagagaggaggaagcaggctgaagaacgacagaagcaggccgaagatgaaggcagacaggagaaagagagacgagaacaacttcaagagctcagccgaccgaccactttcgcggaattcttacgccattcgcatgacctgctctcccgaccgctgagagtcgagacaccatctcgctcgactaccggcaaaataccccttcccactgggaaatattgcccaacacgattggaacactggaccgactgctcagcactgcagtcggagcttttcaattccgtctacagctatctccagttgacaccaggaggctctccgcgtttgttttcatccttgcatgagctagaaggattaggccgacgacttggtcgcaagcccataagcagcgagcaggaacttgaggcctatgagcggttcgccgtagaagagcacatcaatgatataataacggagttgtgcaagatacccgctgctcgcgacgagctcggcctcggagatagcatccagttcagcaatcatacgaattccttgaatgataacgttgccattgaagcagatacaactcaaccgtcaagtgtataccacccaagacctgaccaattctatatccatcgtgtcgaccgcaacactaccactctcctcacatcggtcgagtataagccgcctcacaagctttctgtcgccacccttcgtatagggctccgaccaatggacttatggaaggatatggttagatcaaacaaaataccgactaaccaggaagcgaagctaaggtacaatgcagagcgacttgtctgctccgctcttgtccaggagtatcatgtgatgatccaggaagggctcgagtactcctacgtgaccaacgggattgcccgggtcctccttcgtgttccacacgatgatcatagcacgctttattacttcttatgtgatcctaacagcgaagtgagtgcagaagttgaagatagtttccaacaaccgaagacttctgtggactaacgggattgcccgggtcctcctccgtgttcgacaaaacgatcctggcacactatactactttctatgtaatcctaatagtgaagtgaatatggaaatggaagctacctttgcaaatacttctgttgcaagaacactgtgtttgtgtctgatggcattccactcgccagtgcgaggtcaggagtggaggaattccgtacgaccagacattccaatatggaagaccagtttcgatcacactcgctctcatattcccgaagacgaattccggcaacttcctctcaactctgacagtaccgccccagaatttccaagcccagattctggttcgacttatgaaccatcgtcatctccgccagatttccctgaatcaacagctcgtcaagtgtctacgagatctcgagttagctgtgccccatccgacgtgaggcatcgctcacagtcgtcacaatcgccagaccccgattcgaaaccagcaacacaccacaaacgaaccttcagccaagttccatcttccccatctgcccaacgcgtggctcgacaaagagatacaaataatgataaaggaccagacagccagtcccgccaccgcgatgcgcaattttgcacccagcgatgcttactcgggttgcagtctggcggtcttctagacgactgttgcccaaatgtgatgctccatcgtcgaagcaatgacgatccgcagcatccgattacgtccaaggatttggtgcgtttactaaaagcacaattggacgaaaacattgaccgatgtacaccccttggaggttgcggggcatacggtgcgccgttcaaacttacttgtctcgtatatgggtataccgtcatcggaaaaggaaccacgtcggcgctatggaaagaagtctctcgcgaagcggaggtataccgaattctgcagaaggcgcaagggtccgctgtgcctgttttcctgggtacgatcgacttggcgaaaatttatttccttcacggggctggagagattcgtcatatgctcgtgatggcctgggggggggaaagtacggcatcgatggagctgacgccacagcttctgcaggggatccaccaatcgaacaaggacatcagagcattaggaatcatccacgaagaccttcggcgtgacaatgtcttgtggaatgaagaacttgggcgagcgttaatcattgactttcaccgctccacattgaaatgtcaaccgactttgcggcggccgcgagtctcaaaacgacgactacctcaaccagagattgttgactcgaaacgtcttcgtgtgacgtgaggatgggtgctcattttattggagtagcatgaagcattttcggcccgtatccgtgtggacagttctttgagggctgtattggatctgcctcagcttgtggaccggggatatcaggatcccggtctcttagctgaattctctcttcaagaagggttgatcttagtggagaatctgcctgaatgttgacggctgtagatcctgaagccgaagaacacgggcctggcgtcggcgaataagcagagtttggtgtattcggttcatcgttctctggttctctcgctgtccgtatttggaaagcctgtgtacgttgcatcgcccaatctgcagaggagtcttctgtcagcatttagcagctggaaaaggcagtatacttacttgagtctaatttagatgcaaggttttgtgtcgaattttcaactttctcccacaaatagtcaaatatcttgctggccagagcatcgatcttctgctttccttcaacgcgtaatataccacgatcccgaaggtgcttaatcgcctcagatcggggtttctgtctaatggtatgactctaaaaaaagttttaaaagattaaaattctcaaggcttcgtcacggacccccacgcctgaagtataccaaggcaggagactcacaattcatcatcagcatcttcaggcaagcaaaacaaaacgccgaggtgtgtgtcttccagggattcggtgtcgtcgacatcttcgcataaagtatcgagtctcttcccttctgtgacccatttggagaatttttccttaacctcttttgggtcactgcaaacgatgccagttttggaaattatttcagccaatatttctagcccattggcacggacgtagttaagacataacctgtccttaagccggtagtataacactttgatcaagcgagagcgtacgatatctttctccgttctctgctccaggttcttgacgtagatgtagagttgggccacaggtgatctacttaaatcgaggtcaatactgctttccgtgaagaatgataacgggttatcctgccatcgatccacactagccagaaaatcgggaggggcgtttatttttaaagtattgatgagttcgttcgattttcttgagatcttgaagctttcttgagatcttgaagcttttctgagaataacgaccgatttttcttctggatttttttggaatagaagcccaaagtcgtctgaccaagttcataacctagtcttatgttaatttatgttgcctcgttatgtccttgtagaagacgcacctcggggtccaagagcatgtcactgatgtcatcctttccactagactcacaatcccgacaagccttttcgagtttctggctaaaatacttgctctgtgaaagaccccatggtagcaagttggggaactgtacaaaactgttttgctggtttgtggttagaagaaaccaggggtagttgcgtcgaatctttcctcccggaggtcacatgctgtctgacccttgtttcttgagcggattggtcgatctacaaatacggctgtaagcactgcctgcatgccacacagccaatcgcttttgggccagggtagcggcactagcctgatgccatccaggcaaaggtcaaccacgataaaggcgataaaagcgcattcaagttagaataatgtggttctaatctaccataaacacgctttggtggatttggtggggttgcgcataaatgcgcaacccccattaggcaattttcacagcccacataagggttagtgtcgatatctgttagaaaaccaagagaaccactcctgcaagtattctgccaagcagtgtaggggtcaaatatgtgccgatacagctgaacgtggcgtccaaacttgtacgttgttgattggccctccgctttcaaagttggccttcctagcgtttcttttgtggctggccactgacttgtgatgtgacaggtctgcataaagaggtttagctaggaagattctctcatgtttataaacactagtccctcagctgctgtggtggatctttcccttcaacctctctacttagtgaccacttgaactagccaacatctcgtcaattctattccaccttatactgttaagatacagtctgataaaatatgtcgactatcaacatggtgaaatactacttctaccggggaatgctccctgaaaatcaacagaggctgcgagacttgatagcccttgcctatcagaccgcaagagacagaaaactctaccccaaggccatcctcatcaggtgagaaagaatttcagcacaacgaacaatgatatagagacttgtggcccatgtcattagagacttcgctaatgtcgaccggcaggtccaatgagcactccagtaccagtcaaggaggcatacacaagccggatcccttgggttggcatgtcactctctgtttcaaggacgacgtccagcttgccagcaatacccatgttgcttctcatggctacgtcaagggcaaaggggacttgacttttcttcaagcgactcactcaggggtgaagccagactcccacttgaagtcgagtggaaagccggtatggccttctgaaatggaattagatgttgcaccggagattgggtatggtcactttccaagtgctggtagtggttaggtttggggttaccaatatacttggatcttgaagggtagcaaccggtcgatacaaacccaagtcttgttatgaggattcaccaggggatagtgatagctgctgcctgtaaattcgtgttgcaattggtgctttgtgcggaaaatccaagaatggtagataaagtggctagcaaaacttggcaaaaacaaagacaattacatggatttatataacacattaccgtggaaatctgaatagtgcacaggcgtgcgtattattattattcgtcagcgtgtctgcaaggttgaaattgtcagagatatttactcagtatagcaatagtatagacctacatagaaatgaaacatgtgtatacttgatccgctttcttttgcctcaccagacagagcaagacctacggagtataactagattgagcccgccagcaagcagattagtcagccccagcatcagctcggccaaatcctgaaattgccgaaccctcgggaaagaatttcaatgctccgaccgcatccggacgaattccttttttgctcaaattgaacagccctagaaaaaaagggaaattatcagatggtacgaaaaaggcgtgctcttacggaagaggaagagcaacaaggtcgggagtcccaaagaaggaaatttgttgcgtgcgttttccagatagctcacaccggagcaccgagcactaacacacagcattcacagctgtcaaagatgccactcgcataaaatcaaatgttccggagaccagccgtgtagcaaatgccgcacggtaggcgtcgctgatgaatgtgcctatgctactcgggatcgccaggtgaaagttagtgaaaagtatgcaagcaagccaccgactattattagccaaagccctgaaaagcttgtctattccaagtctcagaccagaagctaaaactgtcctcttcaatcagctatttggatcagatcctcgcagagaatcagcggcttaaggaacggtcgatcacctcggctcaagtcgccgagaccaacgacccctcgcaaaggtagacatctctttgactttccaaaagataacccacaatatacagaatactgaggtttacaacagaggccctgccaagacagcagatgtccctgatggaacaggcattcagaatccattgattggagatcgagcctggtttcaccggtatgatccctcttcgccgcccatctacatcggcgaggcagcatgttcagcattcgcgacacggtttcggcgtttcttgtcggggaatagtggaatgccacatattccgcgaacacagtatgagcgcgaagagacaatcgccgcagcgaacgaagccgatatccagtggccgagtcttcaccatgcccggttgttagtccggatagcaatccaccagatcggacatctgtaccacctcatgatgcgcaagtcgactttagataaactggaagaaatctaccagacacaagactttgactgcgcggctaacaagtgtaaattcttcgccttgttcgcctttggccaggcgtattcaatcagatctgagcccaattctggctccagggtaccaggcacatcgtattttgctcggtcaatgggattggtccagatcctgccagagagaaccagtgttacacacctggaaaccctgctactgttggtatgtggctcagcatgtgctattgttcgcatcaaaatacttaccatatcccaagtctcttttctcatactatctcaaccggcgtcattcagcatacatcctgattggaaacgccatgcggatgggtttgaccatcggcttgaatcataatatcccggaatcacagctcatcgacccagtggagcgccaacaccgcatccaaatatggtggacgatctacatcttcgaccggatgtgggggtccaaaatgggtctcccaatgcaaatcctcgatgaagatatccacgtcgacatgccgtcaaccatctctccccgctggcgccacgaggaagaactctccgactcagaatacatgaccgccaacatcaagctggcacgcatagtgggcgagacaatcacccgactatatagccggcgaaagtaccaagaaaccttcctccaacgcgttcagaaactcctcaaagccctgaaacactgggtagaaacactccccgaatccctcagactcaacatggaagacctagaatcgagcaagaaacccatcgtctcactccacatggccttcaaccaatgcgtgatcctaacgacgcgcccaacgctacttcacctcttaatgacactaagcaaaaagaggaaacctcaccccaataccggcaatcgtaccagtggagccgagaccgaaagcgatagcgaagacgtatccgtttcccaaccagtccttaccctaagcgaagcatgtattcatgcagcgcgacactcccactccatgatcctgacaaggtggatcaacgggtccatgccaaccttcggctatttccacgcgcactacctcttctcctcggcattgatcttggcaatgtccagctttgtaccaatcggcagtccgactgatatgaccgcgttcgactccgcgctggatctgctacgctctatggccgagaatgggaatttggcggcggcagaattctatcggaatctcgagcaggtgaaggtttgtttaggtgagtatcagggaggaaggcgagatgacgggaatgctgatatggctgctggtggaggtgtcgctcctaataccaacgctaatgctagtggtaatgctgctccctctggcaatggtgcagtacctttgtctgggccttcgtcggatttagcaacagctactactccttttttgaacgccttgccactgaacccgtccacatcggcaactatacctccggcatctttgatgcccacaacgcacagtatccttgcttctgccccaaccacacaacctgtccataaccatggattcgatgcatattcctatcccttgagggatgccgtcagtgggtacacgaccgaaatggcgtttctagagccgaccatgcaagattttctggcccagtcagatattgaccttgggctgctgcatcctgttgatacgttctttaacgaggctgagaatctgtatacatgccacgagttttgattgggtatatctggggcatatgagataataatatgcacgttttagacctagtcgttctggtctgtgttgacttgacaagtggctcaacactgtatggtcgaagctggtattcaggtcaagatactatcgtgtgtacgcagagagatatccttgcaggcaaaaacagttacggtctctttccctcaccatcaagccggtgtatgaatcaaaaatcccataactacatacatgagatacagaggaatatgcgcgtctagatttcggcatcaacagcaagcccaaagttcgagccatgtcgtgaaagaaggtccatgcagacaagccaggctctccgggaagaaagatctttggtcgacattgctttcaaccagtgagtcgctttgttgatctttttagtgatatcaacagccttggcggtgcctatatgagtgcgagtgaacagctcggtgagcaggatggtagtcgactgcatgatgttgtgcaggatgcaccaccacggagcgacgccatacagccaaatcaagtccggattttcaggcagcagttcgagcatttggcctgccatatgaacgcacaaggctgccatctgatcacacaccgttccctggcccgcttcagatgactgtcgggatagacggcggatacagggctgcaagattatcagcttggtcgagtagaattggaaagcaagactagcacgctgctgtagaaattgaggggttgggtctagcgttgtgaaatcaaactccaccggaagacgagacaaccagttgtcagtatgattgtttagcgtggagatggcggcttcgatctcgtgccatgactgtcgaactgctctgggagcatagagcatatcaatagcttctcgtaagagatgagccaagtccactgtgtacaaaaggtacagagaggaatttggtgttagattctctacccccgtctgtctggccctttcttcttgttttcccttgcccgactctcgccgttccggggttcttggagccatatactcttttggcgaagttgccgtggtatcggaaattaaagaggggggaaatgtacttcgagtcctttggtcggtattaagttgcgcgacacgcctgtcccaaaaattctcctctgcgaaggggacagggaggggtgtggagcaaaagatttctcccgtaccaggtggacggcctgtcatctcacatagcaccatgtccaacataaacagtgcccaccaaactcgatatcgaagttccttcgaaaactgggtgatgctatcgctctcgcttcgaatgtttagacccatagtcaccgccgatcgactcgccattccgatgagtttccatgacctagatgagcaagaccaatcagatataaatcatgcaataaatcaagaaggaaaaggggcaagaccgacctattaatttgaccaaccgataggaggtagaaagcagccaagccatccacctgtgcctgttgcaagtccggatgatctagcaatactttacctacattcaacctccaagcccgtgcaaaataagtctgatggccgtcgcaagttggttggatttgatcgacgaagaagcaatgtctggccgcaatggcaaacaccaagtttagcactataatccatcgtctcccaggtcgcacgttcggattcgcatagaaggatcgatattgattcagaaagacggcctttccaatgatggggaaggtaggatgtacggcgtgaaagtaggtgtcaatgagcctgttagcgattggttgcggaggccggtgtgcgaggtcgatatcgtcaggaactagaatttccgagtcatcttggaagtagttcacggaagataacgaagggcgtgcgggggtatctttgactgcaatcaagctgccatgatcaagaaagcgcttgagtctatacaaccatgccatctctgaatgttcacccacaaatcccgtcggttgtactttctcatcccgatcgaagtcctcttcggtgtagtctacagcccccgaggaaatagacacatgactagcatcagcacgggagtgaagccctgattgattgatgggccttgttgggttggtgaataaggtagggataggggtagtgagcgtggtccgtgaatttagctccctcagtgttttctcgacccgctgggccgacaagacatcgagcttgggataaagttcgcggagcaaagcatcgaaggtttgaacccgtgtagttagatcgttcagctgcctatcacatgtcagatgaaagtattagaacagacgaaaaaggttaacgacttcaccatcttctctcttttccggtcgccatacgaacacgggacaccggcatccaggcaacgatgacaggctgggcgatgaccactacatttggccttttgctcgcggcaattttcacaagcccggctgactcgaccactgctagtccaactactggattgtgcgttccgggggatagccaccttagcattcacgcggtcgcttgtgttgaatgaaggataatcgcgggcatcacggatagtttcggtattgagctccaggggggaaggttgcgggcattcaggcgcccagtcaaaattgaatccatttcccaggttcggatattcagaaaacggagcaccaaagttctcacccatatcgttactagatatagttttcgaaaggatttgatcataggaaagggttttcgcacgagacgcaagacgctagcgggacatcgactcataagccacactggacgaaccgccggggaagaagaatcatcccccttgcacacgaaggaaaaaattaaaaatagaaacacacaaaagcaaagtcgacgagtcccctactgtggactagtcacaagtgggtttcaaccgagatcgggtcctctggtatgctggaggtctttgccgccactaagagcagcgctaaggccaataagtgctttgcattgcactttggatggtatttttttgaatagacgagaatgaacatcatagaagcttccagactgtgaatatagatgtgttgtatcgcatagacaatggcgcgggtggtctgtacgagccttgctcgaggttttccttcggtttgtagcatccatgattcccatacatataacataaagttatatggaacccgctctctgacaggctgagaagtgatgttctctctgtactagggttcagacccaaatcttatcgccctctttcggtccgagaatcaccggtatcccaaattccgatgatagtttggcaaaccatcattgtgtcaggacccagcatcatgaatacatttcatttggtttgcttatcagaatcagatactgcacggtaagattgctgcttcagtttcctctcccttcaagggtcttggcaaaatttgcacggggatctttgttgtgctttcagacccggaaatacggaatcgtatgacagagtcctttctaggtcaacatccaatgcgtttctttcaaccacatcgtcttgtttctcttcggacttgcctcagtttgggtgggtcgatattcgttcgtcatcaaatcgaagacccactgacgttcgcatgctcatgcttaccgaaaggcaagcagacaacaaaccatcacgatcccgttgatagaagtgactatcatttgatttcctggtcttgtaatgactcgccgaagcgtggttgattgcacgatcagctgcgatgaatagtccgccagctagatggtccggcagtccggcagtcggcagtccggcagtcggcagcaccgcagcaaatagagcaatccaaacgcctaatagaccttcgaaggaagatcacagatgaaactgatcattttcatcatcaactatgaaaaatttagcggcaaaattttgacgcggacccaaagggaccggacctctgtacagctgggcaacgcgcaccagagtcttcgctcaaccctagtcttttgctggctccactgctcgaatttctaataatgcgctataggcagcattttaagcacagcctgtgatctgcaaggcgtgagaaccagaagtctgcaatgagcacttaaaggcaagacagaggacaaaatgtgaacgaaagcctcggtctttgctttatctcataatgtaagtccgagaagaagcgccacgatagtgatatgaccggtgatatgagctgtgatatgaagatgctcatacttcactggaagctgagctaaaagctggttgatgcgaggatagggatggacttcggagcaacgcgcccgttgctcttggtttttctgttagtgcacgcgcaaatccattgagccaccattcagtgtcattttcccaggaaaacatcaaagattaagcgacaaagctcccttcaagctccgctctgtgttagaggtagcgaagatatgttgttcgtgtgttggaggtgccggacaagactcggggacaatccggaaaccaactccgaataacgtcgaaccaattatggccaaagagatcgacattgtaaagcttctccgcccctatgagctcaggcaaaatccatctccgactcaagcctatcaatagcgcaacgcacaatgcagcgggaaatcgagccacgtgttggaaccgttcaaggggaccacgacccaagcgcaccccaaatcacaagacaatcgctttctattcctctttgacgtcaatgaagagtcatgtcaaagaaaaaaaatgagattgggtggcttaattttgggctcttgggtcaagcgtcaagtcgggcgttccgccgctacgggttcatgtgaccattgttgtgattgttgtgaatctagtccaccgagagataatcaagccgtctcggcgcgagctacggacgacaaaaaagtgtttcaatgatgcctgcctgttgtgtccggagaacatgcgccagcctatcggctggcacaggtcgtgcatacatgttttcttttcttgcaggctgactctataaatctgccgtttagggttcggaactagtttctcaccagaattcaattattttcgttgtttttcttttcgttggctttcgggtagcaaataattcattatctatcaagtcaattgattcaatccgtatgatgaccggaaatcagcgactgctattgtatgattacgccatagatcgatgtttatagtttgcctcaggcgaaattatcatgtgaccagaataattcacgtgaccgtggtatctcccctctgcaaaaggctatctcttgcaagaactcatggacgcattctggaagctaaattaactaattacagcgaaatgcaagcataacataatacagaaatgtctttgcgcgggcccatgcggcggtcgcacctgaggcaagtgagcgcggcgagcttggaaagcagctccacccactcactggaggcttcgaaccgtgaccatgaccacgaccaagccatagatgatcggactgtcaggctttcatcggcaagctggacgcgacaccaatgtgcgctttgggtgcacgatgagacgttttcgcgtgaagagattttgttgaatccatcggctttcggcgaaactgaagtgcaagttggcgatctcgtcgagatcctacccatacggggctctggcgataatggttattctacacttaagccagaggcagcttcgaaagctgctcgtgagggtcatgccgaactcaactcggcggctcaaacggacagcacctcgaagttcaagactccactgcagagccgttgtttattcgtcgtgaaggccttaccgccagaaaccaaggctcggaatcctcaattggagatctcagtgaccaacaatattgccaacatctttggtttcaagaatagaactcaagttacattggcgattgtggatcgagaccaatgtgcagcgtctcatgtcgatattgcctttcgcgatcaatacatggtccgatcggacatgtggagactagtcatgtcggagttatcagataaaatcatgtataaaggacaaaagatcatgtttatgggaagcatcaaagccactgtcaagaacatctttatccgagagaagaaatgcctttcgggatatttttcgccacatacaatccctattttccgaagcgagtccgccaaatatgtcctattcatccaaatgtcgaaagaaatgtgggactttgactcggagggcactggggacatcctcttcagtcgggttatcaatggtttcctaccggagctcttcaagcgatgggctaattcggacgccaaacatttggtaactattgtgctattcactcgagtcgaatatgataaacccaacactccaggtcagcctaaactcagcgctggaaacttgaacagcaaatttggaccaaacaaagttccaactcgagatttctaccgtgtggtagtaaatgatatggcaagcggccattggacgaccatcctagacgagctgaaaagggaattcaggaccttcttacgagatgtgtcaattctaaaaccggacgacgttgatcctgtatctggtatcaagaactccaagccaaacatggcgaccattgccggacacccaagttcagctctacgaggaaatattttagaggccattcatctcgcttctgctcatctggcttttgatcatatcgatcgcgacatggtccatactggcacctcgatcattgttatcacacccggtagtggcgtttttgaggtctcctacgagtccttggcttctacaacagaagcccttgcgaaccgaggcatagcaattgacttagtctgtttgagtccgatgcctctccattctgtgccacttttcaaataccgggagccagtggagcaaccttctggggattcagggggagctagatccagtgaagtgaacagggataggatgtcttctgagatacaccattccctttcaagcgttgtcagcagaacgtcatatctttctccaagttcatacctgtctgcaactagaatgagggagcgggcaacacctcaagccaaggaatggagctttggcatccctcattggcttgatatctcctattggaaccctgaaacgtaccgagagtcccggcgaatcttgaaaaaagacccaaatgcgccaatctctcttaccgtcactcgtccatcaaaggcattcacgccacgagtgcgtatgtatgagatccaaatgatgggagttatggaaagcgaacaagcaaacatcacaatcccctaccttactgaagggcgcggtggaacaagacctcgtggatcttggcccggctacaattcaggtagtcgcgctccccctaaaacacgtttcacgaacccttcatctttcaagggacaaggacaacttagtgatagccttcgccgggggtcctttgttcaaaacgtggcagaccaaaatgaatcgcagactcgagatacgcggagttcacgaaaggcagtgatgtcttggatggatcaatacgatgaaacccttttctctgtctctccaaatccgcaccagggtactaaagcgcccaaggcaaagcgacccagtgaagcggaagtccaggctgctgggggtggagtgcatgaacggttatctgcccgttctatcacccgccttcgccatcatgaaacgaatccagcagacgagaatgattctttgcactctggtcctcgaagaattgagtcgaatatgactacaccaaaaagcccaggatcggtcaagagtatgtctcccataaaaccagtgttgaaaaagacgccggtgccaatggcatcacgtatttctcggacaattagcttcgcacttcgaggcttgagcgctactcctccgagggccttggcaagcacagtggtaaatgtagaacatgccagtgctatgccgatgacaaaccaaagaactcctgccggatcaatttccgataccaggagcatcacttctttgagtccgtcagaaactgcatcgactacatcggtctttgaggtatttccgacgccttcaacacccgccaagtcgtcccaaactcccgctaagccgatttccatcaaaatgcctcccaaaaatccaccaaaggaatccgaacggccagaggatgcgggcccccatggatcgctgtcgatggacacgccagcgaatgaagtcggtcggggccatggcgatcctccgaacgatcacaatatcgagatcactctcagccatagtccgcgcgagctacatgcgcggagctccccgagcaaagctttagccccgtgggtccgatcggtcaacccatgcaatacccctaaagatgtgctgcgagatattagttggtttggtcgttggcaacatgcgtatcctcggcccccacatgtggctgtggtgaagtggaagagtttgaagtctcctgcggtgcttccattgacaactgaagaatttccgacagctagcgtgcttgcttcagactatctacagacaccatatcgtgtcttcccaaatgaagattccgaaggcattgaagcaccaaagacacgcggggtacttttacgagaaatgatctcgctgcggctttctcatggcttccaactcattgttggaaaacatgtggctgaagtttctgcgcagcccacccttgaatcattaaacgtcttcgatttccgaggtctagagcgcgatgggctcacagtgtttctctccaaaggcaacgcgattcaccgacttgtctgcctccaagggggagaagttgaagtgacccgctttacgcatcaaaactctgcggtgatcatttctcccaaaaagcctacctttactctttatcaaccggcgatgaaaacaatattaagcgcggaatacgaagtgaaggacatcaagctggatccaacctccgaagagtacaactggaactatgccgataattatgtggctggtcatcgagattatctccaaaatccagcgcagcagctgcaattctggcgagtccgttacgtcttgattccgcttcaactccatgccaattctcggcggaatttgcaaacttctcatgaggataacgaagaagaaattcatttgctgggtatcagccaactgacccatatttggcaacgattcaaatacgtgtcgccggaggaaaagcttttcgagacgtcaaatcccaagcgagaccagaatcccttgaatatcatgtaccaaacacgcaatccatcggaaatcgttacggcagagctggatcgtttgctactcactgatccagggctcgacaatgccccggctcagctcttgccggagtcggaactgttggacagatctagcattaatcttatgtcattggcgcaaattatccaaggcgaaaagggcgtccggatgatggaccgacggtggcattggaggttacattataattgtttcattggatttgaattcacaacctggctgttgcaaaacatacgtgatatcgatactcgtgaacaggcagttaaattcggcaacgagttgatcgatcatggcttgttccaacatgtggagaagagacacaatttccgagatggcaactatttctaccaagtctgtgctgattatcgtgtcactcgtccagagtctcgaggaagctggttccctcaacttaggacagacaaatcgatgccgtcgacacccgctatcgggactgtcaaggactctcctgccagcctcaaagctcgatcagacagcatcgacgagcgcataccacagactcctagcactcccaccaaggcgaagaataaggtcgccatcatgttgtccaagtccatgaaattcgatgttgatccgcgcaagcggtcgaatcggccggaagtgattgatcttcattgggaccgactacataaccccgagaattgcttccatatcgaactcagctggatgagcacgacccccaagttgattgaagataccgtgctttcttgggcttcgaccgcagacaaattcgggctgaaattggtacaggtgccgatcgccgaagcctgtgctatcgacaagacgcagccattccggaaaccctacaaggtcacactcaagatcccaccacccaaagggccattgcacactgtgttcaacaatgcgtcatttgcgcagccgggtccaccggatcgcctctactatcagaaggccatattgcgaaagtttgatttcgtacttgacttcgaagcctcctctgcattcccagcagacgttgaagtctcttactcctggggaaagcccgactacaagtacccgcagttcatccaccgaaccggaagcatcctcgcgcagatcaccgacgaaggtgagttccttgtccttgcgaatcggctggtgagcacccgcagcaccgcgagtcgagacgcagcccgctttgaaaaccacaatcggtccgacttccgaggccgtgatggacttgaccgcatctcgccccgactttctccaataacccggcccgttcatgacattggaagcatcggcagcccacttaccccagctggatcagcaagcctcgacgcgggaaacttgtaccgcgctccggaacacattcttaatggcctatctgagttctgcaacgatgcagcccaactagagcagttctactcggagtcgcatgctcgtccgttatccacgaaggtggaatcgactaccgcaaacctaatggatgcatcgatcccgtccctcgagcttcctgccagcgtagtcagtcatcatatcccactgccgccaggattaccatctcggatcacccgtgattcgcgcgacggactgatatcaccggaaattacacttgccagggctcgggcagaaagcatcagctacaatcccagccctaggagtggcagcttacgacccttgatctgaccattcgacgatacccatttgatgctctgatgattttgtacccaaatgaaatgcgatattagtaacaaaagttaccgtgaaaagaatttgattttattcgactctccacgtatcccgtacagattttacatattctgatctcgatttaagaggcgaatccaaaaatatccagcctctcgataaaattcctcatcaacgctaggccaagccaccatgcattttagcctgatatcagccattcagccgatgttcaaaccgcaccaatccaacggtgtctcccaccccgaggatttgcccccgccttatgtgctaccccgagctccagagaatagcggagctctctggcaaatgcgttattcagaatcaggccatcgcggacgatacgccgtgtcaaatggagcaggtctaccttcctcatggcgtaccggcgtaaaacaaaaagagcttggctgcccttcctgtcgttcactttcttcttttgtctttataagcatccaaagctgaaacgtagccatcagtatctggggtagcttgtgcacgaatttcaggaagaaggatatcaattggccttttctctcaagatgaagttcacctcggggatgtggtgtctgcaggtaattttcctcgcttctggttactgaatttggcatggaatgaacactgacacgcaatcggctggcataggatggcgtgaatattgagtggatgagcaacgtggaaagattttcagttgaacacgactcggtcaacctgctgttgaacaagttccaggcacaccgaggaaataccctcaattcgcgtgcgttttcaatcttcccttggtataggactccagaagctaaacgaaaatctatagccaccatctccgcacgggttacctcaccactggagggtgtcatcggcgtgaagcttgtccattggtaagtacctcaagggctcaaaccagagctctcggtctcggtgcttgttttggcaacgactaacagcatacagggctggccaaaacgacaacaatcctcactaccacctaaacaaaaccaccggacacaccaagatccagcacgacgatgctaaaaagaaactcaactacacaagcgggtcactcaatttggctgtgagcacctccgccaatgatctagccttggaattccaatctccagccagtaagaaactgacaggccaatcaccccgctctatcggatacgttcgcgaccagcgcactgagaagcatcgctatgatgacggcatatacgccgagcgccagggatatatgctcgcagggcttgacctcggcgttggcgagaaaatctacggtcttggagaacggttcggccctctggctaagaacggacagacggtcgatatctggaatgaggatggcggtacctcgtccgagttggcctacaagaatatccccctctatatcagctctaaaggatatggtgttttcatcaatcatccaggcaaggttagtctggaggtgcagtctgagcgcactactcgggtcaatatctctgtccctggcgaggagattgagtactttgtggtgtatggcgctacaccaaaggacattctgaatcggtatactgctttgactggcaggccggctttggttccgtcgtggagctacaacctctggcttactacgagtgagttcgggatattcatttgttctggaaatctggagaaataagctgacattgttatacaggcttcacgaccaactatgacgaagagaccgtcactagattccttgatgggttccgtgaccgcgacatcccactaggcgtcttccatttcgattgcttctggatgaaatcctatcagtggtgcgacttcgactttgactcggagatgttcccggatgcgttggggtatctcaagcgcctcaaggagcgcggtctccgcatcagtgtctggatcaacccgtacatcgcccaggcatcgccactatttgaagtaggcaagaaaaacggatacttcatcaaggtatgttccaagacactagcacacaagaaaaatgatatcgaagaaacaaccactaacaactcacagcgcatcgatggctcagtatggcaatgggacatgtggcaagccggcatggccgtcgtggacttcacgaatcccgccgccagcaagtggtacaactcgcacctggagcgactagtggagatgggcgtcgacagcttcaagaccgactttgccgagcgcatcccagtcaagggcgtccaataccacaacggcgctgatcccgaccgcatgcacaactactacgctctactctacaacaagaccgtgtacgagacactcagcgagcgggtgggccacaaccagggtctcctattcgcgcgcagtaccgcaccaggcggacaggcgtacccggttcactggggcggcgactgcgagagcacattcgaggctatggctgagtcactgcgcggtggactgagcctgatgctgtctggctatatcttctgggcgtctgatatcggtggatttgagggtacgccgccaccggcactgtacaaacggtgggtgcagtttggtctactgtcgacgcactcgcgtttgcatgggtcgtcttcgttccgtgtgccgtggatatatggagaggattgctcggatgtgctgcgggattgcgttaagcgcaagatcttgcttactccgtatattctgcaggaggcactgaagggccatggaaacggcacgccgcttatgaggccgcttttcttggagttcccagaggaccttaacacgtatgctgttgatacgcagtatatgttcgggccgaatttgctggttgcacccgtgtttacagaggagggagaggtaactttctatgtgcctctgtctcctgatgatgaggctgggaaatggatctcgtggtttgatcattccaagtcttatgagtctggtcgttggtatacggagactcatgactttgataccatgcccattttaatccgccccgggtctgttacggttaccaatccaacgatcaaggcccctgaggatgatgccttagagggaattgagttgctggtcaatgggcacctgcgtgttgagactacagtcgaaattatcaactcagcccagtcaggcgagatcttgaagactgtccgggtctctcctactgcggatggaaaggctgaagcaagtggtcacagtgtgaaattggtttatgtcgcgtagatacgtatcaaatagagaatgaaaatcatggaacgtatgtcatttgcatcaaattggtcaagagtcatattagaaaggtaggggaatagctcccacaagcggaactaaacctcagtatgaagtgtgtgggtatcatattcaaacaagtcgcaatgcaagatgcaaagtcgaaaaacaaaagaaaaagcaaagaagagaaacgtattcaaaagctcgaagcctaggtctggtaccatatcgggcaagaccaaatcactaaatgctggcaggcgaaagaaaaagaacaatgcataagtgcaataggcatggatatgcaattagtaaacgtaaaaagcttggtaaagcagaatcaccaaacttcttcaacgtcaaggagccactttcggattccttcacgcaacgtattatcagcacctgatagtgctcttctccgctcgcggtcggccagcccgtgcgtgctgtccacatcttcacggcagtgttcggcggtgacaaggcggacgacttcttcgagggccccgagcaccatcttgcggcattcaccacggggcacttcaaggggaggggcttcatcgcctctgggagacggacccttatcttcagctttacgagcgcggttaggggaaggggcacgcgactgttccattgacgaataaccgctctgccccaagacacgctcgacagcatcaactagaactccgtcgagatccatcacaggctcctcgatgaaccgctcttccacaaaggtctggtcccgctcatcagtgacggggccgtggttaggtttatcatgtccagaaaagaagctggtgaattgtgaggctgatgtacccccacggggggcagcgctggcaggcgaagaaggagtatgaggagtcccagagctgtgacccactattatcttacgtcgcaagcggagtcgtttcaccgtagaagccttagtgtctgcaatcaaagtcgtcgcaacatctacccatctcccattcatatccgcatcggatgtgaatgggatgtatggggatggttcagcccgcattgcctgtttgatttctgcttcaagagtagcgtaaggccggaccgcctggagcgagaaatcctcatggaaattcttcaaccaaccagccacatgggcagtcggtccatcgctgtccttcatagtaccggggaacccggagccactgctgtgcgtagaagcaactgcatccatgctggtgacggaggttcgagtcttctttggcgaggcaatcgttgaatcaccggacgaagaaagtgacatgaaaccaggaagtggaaggtcaacatccaccacgccttcctctgctcggactgacaacttcaaaggcgactcccgaacttggctggtgagtgatgatggctctggcgaggcagtctcggttttgtggggagcagcgacagatgcagttggaattgagatgtttccactaggcgctgtttcgggccggtgcccatcctcattttctgtgacttccttgaccatttgagtcaaagtggttgatccgcgtctagcaggaccagatattgtagagacagacccttttcgagcttcggatggggatggggaatatggctcgctacttccggtagatgagccttgacgggagctccaaagaccggagaaaataccaccccagcggcctccagccgaggaaatactgccgtttgtgctcgctgtagagctgtcacaccgttggaggctctttagcagggtctctgatgctaggctctcgttgccttcggctgcactgcggtccgctctagcctgacttgaatggcttggctgagaagtaaaatggggaacaggaacagtactgctctgggtgatcatagaagtagttgcttcgctcgtattcatggcccgagcatccttccggtgcatatttgcacccgggggtttgatagagcgagcatcagaccctctgcgggccgaggctgagttttccgccgttggagttatttcagatccatctaacgaccgctgagctgtctcctgagacgaaacgctcactgaccgctggtggtaatcattatcgcccatgatcattcgctgagcacgagctcgtctatcgatcgctctccggagagactcctggcggaggataggtacagtcggcgggctttgagagatagcacgcagggagggcgatgtgccaggcctgataggggaaggcaatggctccagccgttgtttggagggcaagaaggcggctagtaggaacacgagacgacgagcagtcatcttatctgggcatataatgactgttctgtttgcaagaatgagttcgccatcctgctgagctttgtgctgctggttgtggcggcgacggtaccactccgggccaaggctgttgagccactcggtgtgattgcccaaaaatgctgtcaaaaccactaagaagaagaagttctgctctttgtcgcccaggccacggacaattgaacggccttcctcccgccagacgccccagcgactttgtccagtgaccacatatggggtttgaagagcgagggcgatccggcgagagctgcgaatagcttcttctttgagcttcgaattgaccgatagaatgttagcaggtaaatgcacaatggtctggttggtccgctgcatattgggatgcttcgcaggctttgggtgtggcccggatagagagtccaccttcttcaaaagaaagagaatttcgttgcgaacaagtctttcgagatgggagagtgtacgagtgatgacgtcccaatgatcaactaataagtccagacgctcgtccagactagctgggggagaggcagaagatagactatcgtcaaagaatgcaccaggccagcggtgatcggagtccagcgagcttgaaaaccgtggccgaggagaatctgggcctggagtactaaatcttgagacaggacgtccattgttgcgtggcagcaaggggatctggatcgtaattgcaaccgcgtacattggtgttttcttctccttgatcttcttgcgcttagaaacatccgggaatgggaactccatctcgggcaatgactcttggtaaagagcattggcgtagtcatgtcgttcggccgacgcctccgctccttcgggaagattcacactgaacatgcgagtcaagagaaccgtgactttggaaggtggcttgtcgtccactcctcgggctcctatcggagccgagggattccctgcggtataggcccgggaaagtggactgccggtggcggatgctgcactcaccccggttgccgggctttcatcagcggaaattatgtgcattttggtagacgacccccgatagctgaaggcgctgctgccgaagatgcagttcaaaaggccggtatcattagagtcggaggagtgtcgcgatgagccaggatcatgccatgtccccggtggtgccaatgtagagctacggcctcgagcacgggaaaaggcacctggaccgcccggtgacgaccggcgtgcctctgcagctgcggagaggggactcgagtcgaggagggaggattgaggattgcgacgagttccacgagaaagacttgaggctgctcgagtatgtctaagacccgcctggtcgttgccttgtgggtcgattccaagaccggcgggagaagaatcggacgcacgagtgtcaagtaagacacatgcatctcggtcgcccaaagcattttgtgcgacaatcacacggaaatctttgattgcatccaattccattcccccacgatcatcatatgcaccagcagtcgaggcattcggagaattgaaagtcgtctgcaatgggaaggcatgggtatgagaacgtcgaaggaggctggcgtcggggaaaagaagaccggaggtatgttcctcttcggtcacagactcaagaggcgttccattgcttcgtccagagtatgtcaccgggttcagagtcgacacagcgctactcaagagtcggccaatcatgatgaatgagaacggggaaacccgcagagtgaacaagtacttagttgtagggatagaaaacgggccggtcgaattcacgtagtgtaacggtgggtatcaggcagctagggtatctaggctgcatcaacccatagcttaattcaacgaagcaagaatcatcatcgaactatgagaggaattgagaagatccagagttatgggaggggagtggaagtggaaggtgggatgaggtgcagcagtggggcttggatcagcaattatgaggtagaaattggctttgcacccatgaggactccacagtctaagcaggatcgtgtggaaggcaggaggttcaatgaaataatcccagagcttctctaagggacccagttgctggaatagagaatccagcagagcaaccaccggggagcggaaacgcgaaagggcggtgaagcaagtcacatgatatcagcctcatcacttacggtgaccgatagtgaacattttggcagatgtcttttttctcatataacatcgatttgattctgactctgatagatgccctcctagaaacaaacccgatgtacgacagttagcagtataagaagagcctattttgatcaggtattaccggctattgggactacatccaacggtacccataccaaccactaatactagccaccatgtcgctataaactaccgtcatcgtgtcaccgtatagtcgggtttacaaggaatcgtgttactcggaggcgctgatttgtgtgatttccaacgcatatgaatttgggattggagggaaatgcttcatcttccaaatactactcatgatcgacacatgccacctctacaccgtcactcatacctcgtgtgatacaagcatcatgcctgcaaccccgaatgccacacctcttgacatgctgtaatcatcatgtttttttttttttttcaattccccgacgtgttcgccgttccatccacgtgtttctgcgcttcagccggttctttttcgtttttccgttttcgtcccctgtagtaaattgacacgaggcgtcacattgactgtcagctattccatacagcatgttactatgttgtagcatcttatttgatattttcaatctacatgtgtaaaagaattcatagctgaaagttcaatttcgtttattgaactcggtgtattaacttccaaatcatttcagttctattatactctcagtgagaacgcttgacttttgcgaccaatcgcttcaactcctcggaactagactccttggaggacttcttctgcttcttcttgctatccaggttctctgttggagcctcagcctcggcatcatcaccggtacgtcggcgcttgcggccctcgtccaacagggccttcatgccagaagtagacttgaaccgaggattggtaggatcaatggcgaaatcatgagtgtcgtacagacgtgagaaacggggatcgctgacattgacttcaaagtcatctgtctgggcaagttccaccttcttgcccttcttgcccttgcccttcttccgggcctgtttctcggccttttcaatctcgttcatgtcgaagtgtttgatgttgatctttttgtcatctaccatcagcagctccaactcagctcgttgggcagctgacgcggcttcctcggcagcacgctcctcacgcttcttgcgcctctcctccttgcgtcgagaacctgctgtggcctttccatcggggtcatcaaagaagggatcattgaatcccatttcttcttcctcttgctgtggcacctcggctgggcccatcttggctggatcagcttcattgtcttcactgtccgcggcagcgccatcctctgtagatgacttggccttgagtttctcctttcggcgctttttgcgctcacgctccttccgcacatacttgtcaattgtgctttcttcgatctccggttcattttcgaagatagtatccttgccatggccgccagccaagcccgatgtgaaagtaacctccatctcgccaacggggcgttcagctctggtgcgggtaggctcgacgctcagacccagtaacgcacgcatgcgctgtctctcggcctctttcttggatagctttgtggttgtagcttctcctgcagtattatcgacaacttcgacgcctccgtcctcgtcatccgattcttcgttctcggaactatcgctaccgaggtaggctttcaggtcattctcgtcaatgtcctgacgtgagccccggaaggcacgtgcctgggcttcttttcttgttttgtcatccgcatcccatgtcaatttgaccttgctgtgctgcaaagcatccgttacaaactcagtaggcttgtagccgtcggggatccgagaacactcgtcccgggacttgtcgtcggagaagtcagtgtcctcaggcacgaagcgaagatcgaagaagttggcactagataaatattcaacaccatccaccagatcgtagacatgctttgcgacgtcttttgatgaaaatttgataatggcgtagtaataccgcagtcggtcgagctgataccgccgtagctgtgtagagttgaattcttcaccatcgtcagccttcaacatggacttcttaatttcctcctcctcctcatcagagtcaagttcctcctcttcggactcttggctggtgttctttttcttcccagaagcaaaaatctctttcggggggccttcaacctcctccctctccatgcgctcctttccaaattcgctagggtagactgtggcgttcaacactcgccccccagacggaaggaaactggaaaagactgccatcaagtcctcggcacgaatattttcccaatcgaggttgacaacagctatccgatccgtcacttcgccgagtggcacatcggaccgttgctcgtccgggaactcgatcacatcctcgtccgcctcgtcttcttcttcgtcggagctttcttcttcagatgacgaggactcaaagccgccatcacgggcaggatcatatgaagcagcattgacccgtttcaattctttttggacatcttcgtcgtcgtcggcactgtcctcatcttcgtcttcatcttcgtcttcatcttcatccacctggtaaaactgcttcaatttttccttagtgtcgtcttttctaagctttcgtccatagcgatcgacaggagcgttgctggagaaatccttatcgtctagcacatgcgcaaagcgcttatcgagtttgacgtgagtctggcgtttgctgggaagacggtagcgaggatcggtctggatgttcgcaaatcgaggatccgctacagagacacaaagagtcagtaatcatggtcatgaggtttcctgaaaacaaagtcttaagcttccgctggacgtactgattgctggaccggcttcgcctttggacttgccagccttggactttttcttgtctgagcctgccattgtgagcgctaggaaatttcactttgcataccacgagcagcaagaaaattcttttaatgcttgagtatcaatagatatcgtcggattcagcaagtgaaaatagtcgagaccaataaattatttcttttttttctgccgtcgaagtcagggcggtcaggcacgtgtattctcaaaatggcaagtcttcttttgactttcccatgcagaacaacttgacaacataaattgtaatagtatctacttgaacttgagtaaatctgcaactttttttataaatatgcttttgctaagtgacaatcctaacaacccaatgcttggtctctaagataaatcataaggggtggatcaacatatatacttgaagacgcaacaaatgaatgaatatttcagcatccgaagtatcgcttctctatccagcgcggttctccttcttcttcgatacgtccaacaatcacattgatcctagggtatacggcagtgagcctcttaaggccccgttcacctgctgcacaagttacgaaaacgatcctcccttgttccaccccatgatcaatcaagacgcgaacagccataagtgcagcacctccacttgacatctgagagtcaattagtatgacagttgtatgctcttcgatacgagacggaagtttcaagtaatgcaactccggctcctcgttgctctcgttcgtttgaatgagcaaacgaccagtgagacagtcgggaatggatcgcttaagcgcggtctccatgcaagagcctccacgtaagatagccacggctgatacgatacccttggggtgcaaaccgaggtacgtgctcccttgtggtgtttccacatttgcggatacatacgatgtcatatccagggccctgcaacagtggtgtcagtaaagcaactagaaggcgctatgctcacaggactcaagttcttctgtgggcgtatcgttgggaattgggagcatgaaggagcgcagtacctttcaatcaagatcgaaaccagtcgatcaaagtaaaatatgaaatcctcttgctgggtttctggggtctgcagaatagtattcatgccaataatctgcggtgtcgagggcaagacgtgtacatttgaaggcagctccacttctgctgcaaccaaacctagtttgcgaagcgcttcggtatggttatcagatttctcctgcagcttgcgttgaatgtgtttgaccaccatgtctgaattagttagtgtataggtctcaaaacgagcagctccaggggttgcacaccaatagcggtcttgttctcaatgccacgcgggataatgatgtctaggattcaaaattaacaatggtatcccaatgctttgtaaagtcatatggctaccaacctgagatagagcgttgaggctccacaaaacgagtgtaagaaggcttcacaaattcaaaccattgtttgatgattccttcaatatcccgccctcgctcacggacgtcacgcaagactatacattgtcagctgggttcagtagcccggttgagataacttacttctgcgacctaagcacacatccatatctgcttcaacaaagatctgggccatcaaattagcacggataagcacaatgatagcacagaaactataataccttcacatccaacatctcgacaattctgggatcatggagcgccaaaatcccctcgagaatgatcacatgaggggagtagagggtggtcgtattacgctgccgctggtgctcagcaaatgagtaaattgggatgttcgctttctttctgtgtgatattcagtcaggtcaaatagaaggactctagcaagaacagtaaatttaccctttcttcagatcacggagggtttccaccagattatcaaagtcaatcgattccgggcagtcgaagtcatattcatttgcgtgggccttgtggtgttgctcaggagttaaggtcttgtaaaatgagtcctgtatagaacacattagaacaaggtctcgatttatatgcagttcacaagctgtaccattacaaggatcaccacccacggcaagttcaaagacttgacaatctccattgccacagagctcttaccggagccagagctgccagcaatgccaataatgctcaagtcctgccatggtggagaatatcgcacttcggtggacgaagaaaataaaggcgagattgattccatgtctacgtgtgcgacatacaacgctgtactttgtaggtatcttgaccctctccacccctctggtttcgattatgacagcttgaaactgtccaggtggggagccccgggcccacgataattacctaatctctagtcccagagcgggttagtcgagggccatttcctggaagttccaagattggctgctcacgtgctgcttatgtcagaggtttataatcaccaatttcggcctagcgtgctactttcgcttaagctacttcttccgccgcgagcttttcacttccttttctctttcgcatccaactcccacacagcgatttgtctttccccatggctgtcgtctcttgggttgccttccagctttacggatagcttcagatcagattcaagactggctatctagaccataatgtctgctaatgttgtatgcttctcggcttgacacccgtggttgctggccttttaacacaatgcagatgtctcgcacttcgtcgactgcgacgcctacatggcatcacttcgagcggaagctcgaagaggtcaaaccatctaaaacgtgagtgacctctattccatccccatccgcctacaccaccgtgacatgatgttcttgaaattaagttgggaatctctctgaaaacatgtgaggaaaaacaaatttgacttatccttctgattcacgtcaccactgcacaattttcattaatccgttgaatcaatggttactgacaattacaatgcagcgatatcaactatttggtcatggattacctcatcaccaatggctatcccgctgctgcgaagaaattcgcagtggaggccaacatccagctcagaacggatcttgaagccatccaagagcgggttgaaattcgcactgcgattcactctggtgatatccaggcggccgttgaaaagatcaatgagctgaatcctcaggtaagaaaatttttcccactagtctacttcacatccctcggccccacttcttgctatgattatacggagtttcatgcaccactcttaaattcccttcggggatatttgcagaaaaacaaacatcttcagtcctcagtatgagcaattgccaaatattgaatcttatcagcatatcacgcattttatgtcatgtgccatggctaacaagacttcaatagatcctcgatgaagacccgtctttgcacttctccctcctacgtctccaactggttgagttgatccggacctgcatggacacacctggtagcgatattactcctgctctggattttgcgacggcacaacttgcaccccgcgcccctacaaaccctcaattcttggcagacctcgagcggactcttgcccttcttattttccccagtgataaactggccccatcgcttgcgtcgctcctggaccctgcacttcgtaaagaaatcgcaacccgagtcaacgaggcaattctgcagaaccagggtgctcgtaaagaggcccggctgcgcaatcttgtgaagacccgggcatacgccgagctcaaggcacgagaggccaaaaaagacatcccagataccttggatattggcttggtcggcgattctcacgacaacagtaacagtaatgaccttgctactaacattcgtgacactctgatgtcgaacaacagcgacattgatccaatgatctcctgatccaacttgcctttcaagctggccttgattgtcacttatatccccctattttgtcaaggcaggatctcctcctttttggtccctcttctagcgcggcgtcttggatccacatttctaggtgttgggcgatggtatctcactagctctaataatatgggcgtttcgacgatccctttgtaatacaaatggctatttcaatatttattttgaccacctatttttctcctgaacatggtagttttgtactccgtagcgtaatatcacttgattatatttgaaaagctccctggtggaatggatgcaaacaatgcattgatgtatgcagcaacaaccagtgtagcaagaatgatagctatcccacgcaataaatcaacccacaatatgaatcaagagtggctatgaaatccgataaagcaacaaaagcaagatctaggagagatcttaagcaaccaaaatacccccgggctcgctgcctgccgaatattgaagatgaaatctatcacaaatgtctctagatcaacaacaaatgacaggacacatacgaggcaaaacaggcttccttagaagctcatgagatctggagaatagaaagtattagcaaagcacgaattttgatagagaaataatgagaaagtagaagacatacctcttccaaagagcgctctcttggcccaatccatggccagcatgcatcgcgtgcggaagctgacactctcagcaaagtaaatactacgccaaagatacatagcaatgacgccaccactgaagctcaaaccacccaagtcaaacacagcagcattgctgatgtacgccaggcttccgaggtgcttatacttgaacgccttgtagacagcctcatcgaggtcaccgtagtcgacctcgttggccctgagaccgggaagcgcggcggcaatcttggtcagtttacgacccaggtacacaccctgttgattagcgcgctgagcagtggcgggcagggacgtgagcttggtgtcgatctggtgcaggagctcggaaagctcgccgtagtcaagagtgccagattggtccttgtcgtatagctcaaagagcagatccaggcgacggagatgatttgtggcttgcgggaagcgtctcttaacccgagcggcgaattcggtccattcagagaaagtaaggtgcactttttcggggtcgcggcctttctcccaggcaacggtgcggaggaacctgatgatgttgtctgcaatgttgttctggactgttgagcagtcgccaattgcatagacgtcgcccaggggagcgccaatcacgcggagatgggaatcagtttcgagagcgtgcttgttgttttggccttccagttcattagagagtttttctgagatctcggctcgggctaaagagatgttgttagacctagtatattgagtaatggcgttagtgcactaaccaactccagtggaccacaagcagaatcccattgggatttcttttacaaccgtcttgccctcttccacctgtgagaaaagaacccggtcattacgcacttccctgacacgggcgttggtcaacacctcaatgccatcgcgagtaaatcggctctgcaagacgtcaatatcagacaaattccgagggggatgtagagaaaacatacctcggcatacttagagagtgcttcgtcgtaagtgttcaggatgtgggttcgactttggatgatgtgaacagaaatctcgttccgtacaatgcgagggaaagaatgaagcagatcttcgtttaagagatcgaacagttcggcagcgaattcaacaccggttgggccacctccacacaccacgaaagacagcaggcgtctgcgctcttcatcagatgtggtggggaggcacgctagctccatattttctagaaccctgttcttgattcgacgagcgtcgtcaatcgtcttcaggaagttacagtgctcaaggcctttcacgccgtgtgggtttgttacacagcctagtacatagacatgttaatacatttttgaacatggccctgcttgttctttgtcacaacgtaccgactccgatgaccagcttgtcgtatggaagatagaaattttttgtctgaccatcttggccaacctgggatatttccaccagcttcgcagagaattcgacatcaaccgcagaagccttgaggaagtgaccattgacccggtcgataatgcgccgaacgggctcaaccagcgaccgaagacccaaagttccaaccgtagcagaaggcaacatgggagtaaacaggaagtagttagtaggtgaaacaacagtgacatggtaatcggcagggttcaagttcttaaggagcgcgacgctaccccagcccgttcccaggataaccagacgaggtttatccttctgccgaagcatagcttccgagtcatagtcgccaaccagcacatcggcaatgggcaggttcttcgggcctccgattcgaggattgagagccaattctgagaccgggatgtccgtctcttcggaacctgtgcggtatgtactagcatcgtaaacgaagaaggcgacgaccacggtgccggaggcgacgacgaagaacccgaagaatgtaaacaccttgcgtagagcattaatagtacgggaccctgccaaacgttcgactttagctgcggtttctgatttgaatcggacccgcatcgagaccggcgccaaggctcggcattggggggctgggcgccgatgaggagtgtgtaaggagcgggacagaggtcggcggaatgtagctgatggtctcgaggcaggaatccgccctggtaatgcccctatcgacttcagcgcggcggcgtccgcacgggtccggtgcagcatcgcgttcaacattgtcatgggaggttgtgtagaggatgttcaacgatggaaaaaagagccgaagcagctcatggtccctgtacactcaaaacacgagcgaccttgaagcaatcgaaccaaaaagagtatatctcacaaaaatttatgaggatacgacaccaactatcaccggcgacgtcatcgtaatggatgtcacgtgccaggagctactcgggaacccggcatcaaaactctgaactcatacgacagtgccggactcggttgtagattcaccggcaactatatctagataagtcgatcttctgtgtaccaatggaaatgaatccgtggaattctattatataccaataactaatcggagtggacatcgggccgagctcgaagaaagcctcaaaagcccaagcgcatgtatgataaagagcaacatagcaaccacccattccggtctcggaagttaaaataaaaaaagccattccccgcgggatgcttcatgtgcagagggaaataaataaacgccgacctcgcttgacatgcaaaaaaaaaaaaaaaaaaaaaaaaagatttcccgtgcatgatggatgatggggaaannnnnnnnnnnnnnnnnnnnnnnnnnnnnnnnnnnnnnnnnnnnnnnnnnnnnnnnnnnnnnnnnnnnnnnnnnnnnnnnnnnnnnnnnnnnnnnnnnnnnnnnnnnnnnnnnnnnnnnnnnnnnnnnncccgcccccgcttgacatgaaaaaaaaaaaaaaaaaaaaaaaagatttcccgtgcatgatggatgatgtggataacgcgagctcagtctcaatctaggtcctcgtccggctcagcgctaggcttcttcttaccggttgaactcttccggcccttgagccgcttgctgaggttggagctggagaccgagctcttgcgcttcatgggccgaggagccaccgtctcgtcgagatctccaacagcgtccaggccgtccccttctgcgtcctcgtctccatccaccctgaactcctcatcgatggagagtagggttgcaaactctcgacatttttggtgcatcgtttcctcgttgtctagggctgtcatatttcgggcaacggcttcccagaacttgtcgccggtcacaccgtgcaccttggtggcagttttattgggttccttcgttgcaggtttcccttctttgttcttgctctgggaatttattccgtagagacgacgaaggtaggttcgagcttcccaaagcattgacaatgatgctgcagcagttgccaacaatctcaatgtcgcagggttcgcttgccgcggtgtgattgtcgattgaggcatctcaagcgcaaaccctggcatcatgttatttgaggcatctgcgtctaactgaggtggaccgattggggtgggggatatgtctgtctcaatcgcgtgtgcaataatagtgcccgttgaagaaacgatacgctccatacacgcgatggttggcacaagttcggccaattgaccgtagtcgaaaaatgccaggttttgggagatgaagcgtgccagtagaagatgttctggggggttgccagttacatccaattttttcggatcgaagttgactttggagcaaaggttcgcgaggaactttttctggtaacggctgttgctgattttgacaatttcaaacaacggcgcaagcttcgagacataaggccgaggactggcgccgttggagtcgccaacaatatcacgttggtaatagaacgcctcttgcacagcccgcatgtattctcgctcaaacatggattcatactgttggtggagcattttgtgcgtgtcaaacgcgattttcgcaattgcagggactgtagaagtctccagagagaccagaacgcccgcgcattcctttgggtgcactaagccctgcctattgatactcgcaatgagttcaatagcagtcagtgaatacgtatcctggcgcgattgtgccacctgaagcatgtttgagagaaagttttgggcgatcaaagcagcagcgccatcattgtcgctagccctcaaggaaccacccaatctggtagtgtcttcctgagcggcggcttctgcggttggcatgacggccttttctgacttgccttcatggatagcaaagaagtctgcaaaagatcggagaacgatgttttgcagacttggggcatcttccttgaaaacctgagcgaaagtctgccgtgtgcgttctctgccgaattgaccaggccaagactggcatatagatcccaggctttcgagagccatgaccctcagttcaaagggtgaattcgatgcaatgaagggaataatagagtcaaccattagccccgcaaccgagccaccggtccaggtggggaattcacttttgaaatgagatgcatacttctcaaggtcgcaatgccgtccaacacaacctgcaatgcgaatataactcttagcgcgacccaggattgcagcatgtgtaggcgaggagagatcgacactcttatactgttgcaatggtttcagtactgaaactgtcaatttcaccagtctgttcgtattttgcagaacactgttgatggtccacaagcaagccatgacttcgttcaactccgagcgggagagcttagcaacactcttgaaaaggtcattctgtacttccttgagaagagtgttgtgggacgaggataaaaacggcaagacgcagcgatagataaccacaaccgatcggaataagaaaagatcatctgcggtagaaaggtgtccgatgtaaggatgcagggcctccagctggtccgaggtaaacagcttcgcattcgacttggcaaagacggtgatcgtctgcaaaagagcttgctgggataccttgcttgatccatctgaatcctcaaccagtctctcgaacatggtagcgaccattgccttacaaactttgaagttcaatgccgccgacttggatttatccgaaagaaccgctttcagacagactctaagagactctagggcagtctcactacgctcagtcagaccaatgacgaggcctacctgctctccaagagccattttcagttttggcccttcagacgaggaatcaatggattcgtggaacggaacgagccatatttcttcgaaggtttggcgagccaaacttgccacgctctcctcaagatcgcctgtgcgttgaaggaaactgtcgagaatggccaacttcagttccttccgaggcgttttgtggtaaatgtccttcaaaagtccgatgcagcgtttgcgaacaccagctgtttgatcagctgcacatgctaaaatgcttcgacatccttcttcttccagcttaggctttagaccaatgcattgtccgatcaactgtaacgcggagtcccgaaccataggtgaggcatctgtcgtacaccgatgtataacgcgcaaaacggaaggatctctgtcaagaaggttcgggtctttctcgagcatgtagatgacacttttcaagctgcggctgcgaaccttggccgagtcaccaaggaaagaggccaaaagaactttgagaatggtgtcgaatgctttgccgaaattggaatttaaaaccgtgaggatataggcaaattttccatgcacgttgggaatttggtcgaattctttatgagtctccaaccagcgtggatctgagaaggacattgtcaaaagagtaactaagccatcagtcacctcgtcatgtgcaatttcttcatggttctcggagttgtaatatagggcgcaggctgttttggcccattgagccaagtagtagcctcgcgcgctggtcagttgccaattgtcggaattcttgtcttgcaaaagatgctcgagcgcaatcctatacgggcccgttggagtgatgaggtcctgatgatgcagtgcgccagaagaaaattcctcgaattgttgcttgaggtaatcagtcaattcactgtcggaatcttccagagccgggagcatgtgctgagcggttgctatcagatctgagatagcagaacccatccagccaagaagctcaagcgccatgctcttcgcagtcgcagcgcttttatcttggtcggtgatctgaatcatgcgtaaggccaagatccggagaagcaattctgcagccggccaatcagccgagcccagtacattgatcagatcttgagtgaaaagatccagaatattccgatatggctggtcaccagttttcgtcgagttcatagcacgctgaacgatgaagttcacaatgtattgtgcagagcgcatggcattgtcatagagtcggttggccttgttcgctaggcgttccaatgattcgtctgactcgccatcagactcaccattagcatgatcctcgccattgcccataagctcatcatcgtcgtcatcggcttgtgctttgattcgacgtttgaccttcggtcgcgagggtatctccaacgcagttgtctgaacaagctgcaagactagcgcggtaagtagttggatgttttttccatctgcaactttgaactgccgggcattctgacgtgtggtggggagtttctccagtgagaccagaatctcatctagaatgaacggtcgctgctcagggtatttggaaaacacctttgcaagcacatccatcgcaccacgtctcgcaggctcgtacttctgatatcctaaagcggagtctttgtcattatgcgcattttccacaaatattagctttgcagcaaagaactccgcggccgtgatcgccccctcggagacatcaatgcgagacagaaagtctgcaaaaagagtgagaaccttcttgctctggtgaacaagagtgctaatgatccgtctctgggaggaaaagaattggaagtgctggctgtctttgccaccaggacgagattccactgcgggaataatgcaatggtcaaatacttgattgagaaccgtgggaatggcctcgatgagatcctctggacaaagatctcgctcagtctgacgcccagacatcgtctgcagcagcgttccgattgcaaatagtgcgttcaacacatcctctatcttacccagccactcctgggactcaagctcaccgaatgaatcgcctaggccaatgtccggagattgtgcagcaataattggcttttcgcacaatttttgaatgcggttaagataatcagacggtatgtcctggagtcgatcaaaccctgcaactttccgaagggccttctgcaggcgagtgtgagcatcagatgatagtatcaatccatgaacttctaaagattttgggttcacgaaaattggattcggcgtgtcaggggttgggggaatcgaagtatcgggttcgatttgatcttctgcttcaaaaatctcgtgtagaagatcttgaaacttttgcaaggctgcatctgcttcctctttttggtccttgagtcgtaccgccgccatggcgtcttggtcatgggcttccggtttaggcttccttacgttcgcgtaatcgctgtgttgttgttgtacgggtttgattggaataacgacggacagttgactcgatgtaagaggaggattcagctcaaaagaggccgagaaaggtgccgagttcgatttgttcgcaacgtatgctcgctgattcaatgaagcaactgtcttcggtgtgaggtctttattttcgggctttgtctttgagggtgcttcggggtctgcggccggtcagtgaattgactataaatatatctgtggcatctcagagcttacatctgaatgcaatgtcggtggagttaagcaccatccgtgcgaaggatccaaggctattaagaccggaagtagcaccgtcaggatcgtttgggcgcaactgttgacttcgcgtgggaacgcgaggaagcttgaatttgctatggaatccaaattagttgactgcctttcaaatatttcacatctccttacaattctgtcagctggtctccatccagcaactgttggatatattctcgagacgtttctaaacgactagactcgtcccgtcccgtttgcatttccgtgtcaagtgcacttagtgttttgcggccttcttggaggacatggtttatagacgtggtatttgaaggccggccaacatcgggacgtaggatgcagtctgtgaatacaagctgtcagaaaaatgagcataattgaggagcgaaagaacgaaccaaggccgaagacaggtgcgctggacatagatgagtactgcaatgcttcatccacagatagcgacctttgattctgaaactgcatattggaaccatatggtggcatctgatcatggccgctgatgaccacctgaacggcgggtcgtccattctggtccatggtcgcggttaagttaaaagaagaagtaggcgcgagtcaagttgacatgctcgtgatagagacatggcaatgaaggcaggcgccctatgacatccctagatcattcaagtagtttaaaaaaccagaatctgaaagaaaatgagctgagctacgagcaactgcgttaatgaattccgtatgggtgacggcacccctattgccgtctgtgaccgcctctgtggaggctcgtgcatcaaaaaaaaaagttgcatagattattcactgcataaggcctgtttcgttatcacttcgcttgcaccttgatcttctgcagtatccagatcgtcaaaaatacttctcactcctcaacatgtctgccattggttccttgattttctgcacagattgtggtaatctcctacgagaatctaccggcaatgcagatgcgattctacactgtgatgtctgcggcactcggaataaaggtatgtgactaaaacccgttattcttgccaggttgatagatcaatcattgctaacttctatttacagacacaatcccccaaacaaccgtgtcccagtccaagccctccgcattcccctccgcactgagagccaaactatcggcagtccaggtcctgtcagcagaggatcggaagactgaggctatcatcgaccgtacatgtaacgaatgtggaaggaagcagatgttctacactacggtacaactgcgcagtgccgatgaaggaagtaccgtgttttacagatgtgtctgcggattcaagtatgcccacccgcctcaaaagcatatatctatgcatgcccaacaaatactaactacttcaacagggaaactaccaacaattaaacttggagtaacggattgtacaaaagatgtggggaaagtctatttttggagaaaggctgtataactagcgggacaagagtattaaaatcacgaccgtcacgagacaaactttttttttgcaggatctccatcatgcagcaacaggtgcagcgctatccgggatcagcgcatattgggtttcgccattcttctcaaattctgccatgtcaagagcaacgatgacactgtccctgaccacctgatcaggatcattcaaaaatttcttcaaggtctcctccacaccctcctcctcgcccaggctgccaagggcctccgccgcttcgtgtcgcaccatccctacttccgaaaggtcactcagcgaggctgtgagacttgggatcgaggcagggtggcagagttgtccgaacacaaaagcaacctcatggcggaaaagagcagagggatccttgaggcccttagccagcgcattgacggcgtcgactgccgtaggaagatctggtggcgaggcaaggtcgcgcaggccgaacatcgcacggtacctttggaacagaggaagctttgtgtcaagcagtgtcttttgcaggtcgggtatgcagggttcggcgctggcatctagaggcatgggtggagcagggtcgatagacgtgaaatcactgtaaatcgaagatctcaatgtcagcatttctcttcatggtatataatctcccgcgcagatcgtacctaggcttcaatttctcggccttgcgctcttctgagttctcccacaagattcgatcgacagcaatgtcgcaagtctcccgaataatctctagttcattcgtatcatccctcaatttcttgaggatatccaagctatcggcgtatccaagagcgcccagcgcttcggcagcctcgtggcgacacatcgcatcctcctcggtatctttcaccacatgctgcaggtatgcaacagactcgatgtttttggtttggccgagacagtaggcaagctcatgcttgagtagcgccgagggtgatgcgaaacctgcggcgatcgcttcaatggcggggagggtctggtctgtggtaggctgtaggcaggccaggtgcttaagcgagaaaagagcgcggaagcggcgagcaagcggctcagattcagagaccagcaccttgcggagagtaggaacggtattgtctatttcgaaacccattttgaggagtgtagtcagagggggagtatagaggtggaaaagaaaagttgttaatctttttgatcttatcattttttagagtggggtggcggggcccattcaggcgcatggattttggatttttgctcgtacgttgttgtttttaatgcttccggtgtaagcccaagacataattgttgatagttgcagattagactacctaggtacccttacagctcataatcatgtattagtgtaggtttaagggtggagtatgcgggctctcgcagatgggagcgctgatcttaggagatatactgtatgctataaaaacgttgtatggtgtgcaaatgttccacatgtatacttcagtaggatgcttgagctttaaaacaataaatgaccgagaaaccaaatagatattctcacaccgattgtacacatatcacgagatatatagacgtcccaaacttgtagtcacaactggagtagaaactcggatggattagtttgaagcactatataagtcaatctagcctttatattatatcctttagtatattgtccgtgtgttctctgttcatttagcaggatacttactgtaggctgggatccgaacacggctgttttgataaataccagacagttggagctacaagtattgatcaatagacttgcctagacacctttccaaggaaataagacataaataataaaaaattagcaaagtcatgatcctagagcctcacatgctcatcccattatacaatgctgttgactgggaatttatagcctgagtggaagctctatattatacatcgaggacactatctagttttatactccgatggacctgagatgttggtatcgagatggggttggagatgtcgtgtgatcggtataatgagcataccattagcaaagaggtcgtgatgtcggttagttacattgagacgaacacattgatttgaacctgatatcttacaaaagcgacacgaaaagcgacatgagggatacacatgtgtagacacttcaaaaactatttcacaaagcgcatcaaaaaaaaacaaagtgtcaacacagaagtagaattgacatcgttccctaccttttgctcctggtagttgtaagggagttgaccggtagttggtagccctaactcatgagaccctttatattagaatgtaatatattgaattacttgaaattgaattcgagtggtaaactggcaaatatgtacataatacagcgcgaagtcaaatcatttggtcttgatatgcctgagcttcttgggctcgtgaacgtagttgttggcataggacttgggcacgatacggcgctcgttcggttcctgaacaaagtattcgtatccctgcttctgggcaaaagcgattgcatcttccttcgacttgaacttcaggttggtaccctgcatgccatcggcagacgactgccagcccatgagctggttctcccaacggtaaccccgctgcaagacatcccaatccatgcgccagtgatgctggtgccaggtaccttgctgtgttgcggccttggtagggcggtagatcctgtgggagtcatgggttagtgtgtgggaagtagataggtgatcaagctctaaattcgtataacataccgaacagtgcgggcctgaaggtcagtgggggctccggagagcacggccgcggggagagttttgccgggctcactgccatccatcacacgcttgggcacaggggaaaattgcctgaattgaagccagacttgttagtgaaaggatctgcgacggaaccaaaggggaatgtcgtacgaggtaccgtggtcaatggtggcctcataatccagcttgtgatgggtcatagcctcggcgggggtctccttgttgatcaaggaactgtccttgagaggcgtggtgggagcatccgaggtgttggtcttcacggaaggaacgccaacgggggcattagcggagatgaaacgggcattgacgggcacagcaagtcggctggcccgaaggctagcagcacccccgattctgaatagtgacattatgtctttttgtatgcggggaatggtcgttgccaatgaggtcccttcagatcccttcaagtgtggtttggttgcgaatgacaggcaggtcacgacaccaccgaatcgggtttagccgggcttggcaagccgaacacccgcagggctcggtttgttcctccttcctcctccatcagctttctttggttcacttgcgccgcgaatcaatgtgagtccacgtctctaccaccctgcaaatgcccattgacagccgctctattcattgcgcccaatctctgaccccctttagcctagacaagatgagctacattgcccgccgaggtctctcgaccttgatcccccccaaggtaagagcatccctgttcatggctatttgtagtcaatcgactcttcaaacgatgctaattgttccttaaggtcgcctcccctaacgtgagttacccacacactgccatcttcgacttagtgcatctctgccacacccgtcccgccccgaagccgtttttcgtgaaactcgcgatatgatcaaaatgccgcctttctttcgccttcataactgacaaactctcaatcaaggctatcggtgccgcccaggatgccgcccgcatggagcgtgttgtgaccttctacgctggccttccccgtggccccgccgctgatgttaagcctaccggcctcatccgtcgctaccaggcccgctacttcaacggaaagaacgcctccggtcttcgtacgtattcgtccattgggatcttgtattgatacaagactgattttcatgcagcctttgtccacgctattgccggtatcttgatcatgggttacggcatggaatactacttccacctgcgtatgtgttccagctattaccctgcttatatatcctctatatcgtggggacatccactgacttgatttctggactaggtcaccacaagaaccacccccactgagctttctctttccaccgaataggtggaggattgatgtatatactggatcctctgtcctagtgcaagggaaaaccgtggttttagcgagaactttagaatctcactgtgtttcaatattcagatttaccatcctttgttgttttttagtagatttggaagtatacatattacgtagaagcttgagtgacgggctctttccatagtttttcatcacatacaaacttcaaccggacatcagaaattctcaccatttgcaagcaacgacatcatccataaaacccaccctttataaaccaaacgaaccgtcaacaaaactagggctttcgaagagatcttaaggtgtgtgggcagacagacctcgcaactttcgtacgggccacgctaaaccgaaaacagcgaccctcagcttcaacccgagctgactcttgaatctcgtatcatccaccctatctttgtatcatcaaccgtccttacgcataatccctccctctttgccctaatccctttctgggacgtcttgggctgcggacttcccaagacaaacgcgcctatcgattccgcgatcgtgctctccacaccaagcctaacttaacacgggctttctcatcatccgagagagttggccaatactacatctggttgtgatatcccatatattcagggtgcaaccagtcaaggaaccagtgcaactgtggcgatccttggtatctgacgataggtatgtctccttagaatctggcatgattgatctgcagctgcctattacgaccctgatctatctccccgctgtcagggcacttggcttacttgttcgcaattattgtatggaatagaatcgagtattgttatggcagagcagagcaaccgcgatgtggtagatcagaccctgtcgggcggcgagccttcgccttccgacgttcctgcgagcaccaacgacaatttatctgctggaggggacgcagggaagaccgaacatatcgcaatgactaccgctacatcgaacaactcaaatttgaaagatcagcaaaaccatgataaaacgaaccctcctgattcacagggaggaaaagccgccggtgacaaggatactggaagctcgacgacggtgagctcgcttctggatgcgctacagagaacttgctaatacgggcgcaggatacttctaagcaaggcaccggagttgttgcgactcgagttcttgaacttaatggcctggcgtcggcatcggacggcggagaggatacagcatcacaaggtggttcagaatcggatgctagccgatcagacagcaggaatcccactcacggtggctcagtcaaaaaaccagcaggattcaagccagtttcatttgccaagttttcggtaaacaaggttccgggggctccaacacaacctaaggtgcccgagaaaggtaacttctttgttaaactgtctcatagttggctctaacgtgttcagcgccgacctctacaacaccactcggcaccccacagccaagctcccgaccgcgcttggttgcgaagactacactcggcatgcgcgattcgttcgcgaaggctggagcaggcggaggcaagcctggtggatcagggcctgatccaaatcaagtgtggaataagaatagacgtatgtattggtcatgcgatgcagtgaaaccacttgaaaactaactgatatccgtgtagctgttgtgcccgctcctccgaaacacttgaccgatgaagaattgaaacaacaatacggaattcatatgacttctcgtatccaagaagatggggctgttacctccgaagcaaagtgggcagatattgatgatgatgaagacgattgggcgcctgagacgattgagtggacagacggaactaaggtcaatctcactcaacctcacactgaacccccgccggctcccagtcatcgggagcctaaggagttaccgcctgcggaaccaagcatagtgaaggagcccgtcaaggttgcgccgaagccagctatatcaatgggatcccgtgccatggtactcaaggttggagcgaacgctgaacggcaagcgagaactgcgagtgcttcttccaacggtacgaatgacaaagttccatctagctctacaagcccagcacctccgtccaagtctccttgggccgctctgcctcctgtcgaaagagtgtctccagtcaatggcccggtccagcctcaccaacagcgcatgcccgtgagatacccacagagagatgacggccatcatgcctcaatggcaatgccacccaaggagattgcagcggatgatttcaaccgtgcatggaaagatcagtcagatttgccccagcttttcaatcctcgatcttcccagtatgagccggtgggtgaaaccaggagaggaacttggcgtcatgaccaacacccccgtgctcctgcagttttgcagaggccacacgatcatccgagtggaccggcagagccatctgccgcattccagacgcaccgatctagtcatcaggacggtatgggctggggtggtcgccgtcgcacatcatcaaacgtgagcggaggaagcggaggatttggccgtaggatgtcagctggccgatttgatgcccctccaagatacaatgatgctcgaagaggttcccaagtgaacggtctaggtgattcagcaattgtgggtcacgagcagcaccatggcaaagacgaaattgctccgtctggtccaaatggtatagcacgtccagctgttgatgtaggtatgtctcctgtggaaacacaggctgcgattcctcaagttcctcaagttccgcaagaacctcaggaggaccctgttgctctacaacagcgtatcatgaaggagaaacttctagaggccaggcaacgaagaattgagcaggaggagaaagaggaagcggctaaaaaggagaggattaggcaacgtctcgcggcgatgggtccggcgccagagaaaaagactcccgaatcgcgcaaccccccatctcttcaacctcaacctcaccatcactctcaccctcttcatcctacccccacctcttctcaacttcctattcaacctctccactctatttcttcacctcccaaaccacctgttccagaacctaaccgggaaccaaaacagtatggtatgatgaaagtgcatcatccagactctgtcaagaaactcgttggtgcacatgaccggaactcagagcaaaaacatatcaaccgacgtgtctcttcaccccaccaagaaacccatcgcgactctgcacccgcatctgcctcccacttcaaaaccgaacctcactcacccgtccagaacaagacatctgattcaaagctcgacgagcacggtactcagtggcaaggcaatttaacttctacttcgccgtggtctcatccaaatatcactgtcccatctacatctgcgaaaaatctatggaaaccgtttggcagtgaccgcactccaactctcggtaacggcatctttgatcaacctctgggaactttcacatcacgtgaaaatcctctaggccaacttggcttggatccgtcaaatatggcttcccctcccaagttctctgctcctaaggagccaaccgattctttgccatcacctgaggcacgtcacccctcatttgaacccctcaatccaattggacgccctagtccgatcggaccaccgagcacacggaatacgaatactcgtgccattaccgactggaataacttccacgagaacgctttggaaaaggaatccgagaacgcgaaggagttcctcaagcgactcaacgacagacagaagggagtcccagcaccgccacccgcacctgtggtttttactgagacttggaagaagacccgtgccactgaagacgggagacgagtcatcacccgggtcaccgaaagggttatcaacaatgaagaagagattgccaaggccaacgcggccacaaaccagcaatctaaccctcttacgagtctagatgctcctatggatggcctcaacgtgtctgatatcggtgttcgtccagccggcaatgtttctacccggagctcccgattcttcccctcggcatctgaacagtcgaaacgccaggtcgccgagaaggagcgcagcagtccttcgccccctcctcctgaggaagttagccaccctgtatattacggagacgcgaagcggccccatgttaatctcccggcccctaagcctcccaagcccgtcgtcaagctcccaccgaaggccattggtgtcccagcgcccccgccaacatttgcttctatggcagctgcgccaccacgtcatgcggtgcctccttcttccactgcgctttcgtggcaggacaagatcaatggtctcttcgggaagacaactcctactcagaagaagagtgtcttagctgtgacatcagctaccaaggagcctcttcctgttcacgctactgctgtttctgtctctatacctcagaccaggattggtctccaggctggcgatggcgatttcgccgttcgacaagtcaatgaacaggatgagatgtttgaagaccgcgaacccggctctttgcctgccgttcgtgtgccgaatatggcgccccagaattcttggagcgcaactcgtccatcagagcgaccccgtgggaagaacttcaagccggtgcaagcgcagagcattcaggcattcctggttggacacaatgatcgggataatcatggtaatactcgcgcatcggttttccttccaggtggctctgaacccaaagtcgttctcatccaacgcaaggctggatcgacccgaggccgcaatatcaataccaatgtcagaccccgcaagggagtcaacaacaagtctggggaagtgtctggtggtggcaacaagaagcctccctccaacaccatcccacgacagcaaccccgtcagcggtcgggctggagcccagaaccccccacttctcattaagaagtatcggccttgcaagcatatggtttatctgaaagcgttttcggtatcttctctctggttcatttatcttgcctggcaggcgagaaattggggtcaacctcgccaactcctaatcaacatttgtttccgactcttgttgccattgcccacttcgttactcgtttctgaagttgggcccacatttcagatcctccctctaccccttcacgcattcgcgtttctcatgtacttgtgatttccagtttctcacctattgtgtcccctccccggacccattcggaattgcggcttttcttttggcttttgatgtgtggacgatcaccgtctacagattcgacgccctgtttgcgcgatcattgcccaagtggtgcatgcttgttctgacctagcagtatcacattgccgagtattcagccaaatccgcacggatacttaccaagagaattccattgttacacaattccatgttctttttctgttgtaaacgtaatctcgagctctcaagataggcaaataaggtgagctaggtaacctcttaccttcagctgggtagtttcgctagaataaacccttacaccttgtaattagatagcaagatggtgaggtagatttcgactgggaagttgagggtgaaagtgaatggacaacgctgtcgctttctcgatgagattgtggaagtagtagattgatggttcatattacggtggctttactggactcacatcagaagaagacaaaaaagttctccatctacgacgatttgacatactaagtgatgaaagagtttaataaacaacaggtttagaagtataaacagaggatagttaaagatttaaacatatgataggtatcaaccgaggaaagcccctacaaggctcaaaataaacgccttgtccctggaatacgccgcccagatcaacccaaaggtcaaaacaatcgaatcaagagacatggtggcatttgtgatgcgacaagtctgaagatgaccatcgtttcgacgtccataacgcccccaaaccaagcccgaacatccattagataaccacgcatattaaaacaggtcgcatgatattgaacaaaacgaaagtgagcagagatttctcttcaccagttccaggtccggctggaagcagcaaagacaggaggcttccactggagacgggcagggtcaattttgcgcgcgcccttgatctcctccttcttgagtcgcttttcgtgctcctccacgacctggtccgtgagtacaatgacccaattacccttctgcaaagagagttagtaaatcacacggtattgtatgtactgcagtacagttatacgtggaaatcagacttacgtggtatcggagcatgttgaatacaactagagtctcgtggacgtccttctcagtcatggaagtgagcaccgcgagctcgttctcgcttatagcttctcgggtcggctcgatcaataactccactagtgtctcgcgccagtactgtcgataaccaagtagacccaaatcactgagtggcttctcgggggagccgagcttgccttcacgcttgctgagctcgtagctgaatgagatgagcagacggccgaagccgcggcgttggtattgcggcaaagtcataatacacgccagattatacccctcagcggagtccttctccttagagaagtagccgacgaaatggcagccggtttcgtcgcgagtcgtcatacaatagaacaggaatgggtcgacatcgtagtaaagcgtcttgtggtcgaggaagagcttgctcaggagacacaggttccggcaccaggtgcgctggcgacggccgtcgacttcaaagaaggagatatagtcgtcgcggtaaatctcattaccaggtgggtgggtcaaggtgcattttgcgcgatggcgctcgaaagcacgcttgttgtcaaaatagctcaggcagaactcgtcgatgtagactaggtcgacgtccgagaaggaatccgggtacggcgagaagtaccacggctcgacgtcgtacttgcccatctggaggcgggtcaagtttcgcacgcgatggatctccgtcgggttctgtgtcatactaccacctgtgcggagtcgctcgatttcctcccctcgtgtaatcacctcgcctgtggtcgtttggacatgatcttcttttaccgatttactttcagctgcagcatctgccatttcgaagtcttctgactcggtggccttgggtgtgccggctgtcgaaacagcctcagatgggaacatcgatgagtctccaggtgtttcgacaccgaggttttctttgcctccagccttcgagggccgtgacaacttgccgacgttcgcattattgccgcctaagatatcgggtgtttgtgacatatcacggctttcagcccgagcacgcttatttgcattcacattcttgctaggcgccgctttgctggcagcagcggtcttctttttatcagccttatctggctgaggccattcaacttcttgggagagatcgatgcgagaagacgcaacccattctgacaaacgagtcagagaaaagtccaaatgaatgcatttgtggaagtgggaacttaccatcaagacgtttgttaaaatcgacatagtgtacgctgggttctatatcagcaccaattcgaaaaaaaaaaaaacagacacaatatgaatagaggcaaacatactaaaaggaaggaccatcctttcgctgtctgattgacagaatctcagcttttcgcagttctccgtcctacatagaatagtcagtatcaaagcccatactgattgataatcacgtgatatggacacaaaaatctgcgaccacaaggccagaacgaaccttctgcaccatggctttcacaccgattctacaaagccagttagcacttgcgaccgatgaaagtcgacctaaaaagcccaaggctaattattctggatataaaaagcgacatacctgatggtgttgagtgtggcgaaccctctgtcaacggggtcgggcgtccccgtcgtctccccgtgggaatctcggacgcccatgttgtcggactggaagttaggattgaagcaatatcagagatgggaatgatggaatcgagcagatactgtggtcatttggtgatggggaaatgatgcgggaaagggagcaaactgggtgattgttatgtaagctgttccgcatcggggtcccgagtctatacaggacttcattcagctgaagatttacagagtacaactatattacaagagggggagggaaatcttttcatttcttgaaccatcccaaatgataatgccataaacaccgtctcccgtttgcgggatttacattcccttccatgttgtcatgatcttgtagataaaatgcaaagtccaaacctacgccaagcgccttgcaatgaaccagagatgaagagcagccgagaaagaagccatgtgctcaacctaaagactatatacgtctttcccatcacccctcaaatttccgcttgacaccattcgcatttgcggacggtggcaaagcttgggctctccgttttttgtcctcacccgcagcagccatattgtgctggcgctgcttccaagctgttttgatgaggggagcaaggcggatgagatcctcttcagtgacgcggtcctcaatactttcaagaaccttttcaacagtggagatgtggttcgcatcgttcttgtcatcacgaagacgatggaagcgccagcgtccttccatatctttggcgcactcaacaatagtgtcatcaagaggaatgccaagagctttgagatcttcccattcctttggctcgagaaacatctctccaaaatgacggtactcaccagcattgagcatgacgaacaggtggcaggttgggatagcgtcgtagtccacgtagggctgggtgataccatcagcctcatcctcggtatctggctcgagtgtcggaaactcaaggcgcatacggaaatcaacagtgttctcctggggtggcttccatttgaggatgtgctcgtcggtgccgatgcggtacggagtactgcggcaagtaaagatgagaccgtcgttgccgtgaatgcgcttgaccttgggaatgatttcgcggaacatcatctcaaggccgtaactaaattgtgtggatttgtcctcgactgcgaatgggcggtgattcttctcctccgggaatttgcgatacatggcattgtatggcctgagtaccttctccttgaagtatgctagacgcttatcaagggtacggtgcatcaagctttgcccgtccagcaccaggcagtcgaagaccagatatttcagctgggtggttccatcctcgtaggtgtcgttgacaagctcgccgtcaaccagggtgtcgacgtggtatccctggaaactttcgtcgttcggtagggggaagtgtaggccgggcacgtagcggtagtcgttcttgcgatcgatcaggtaatgaatctcgggcatatcggagtcgggatctccgcgcgcaaaatacatcaggcagcggataccgtcggtcttttcgcagacaaagtagtcctcccgctgtagctcgacaaggtgccgcgacgagaagctgaccggttgtgcgccagggaagttgaggttgttgcgcccgagaaggttggcgacttcgcggcgaaactgatcagctaggtcatggtcggctttgatgccaatcgcgtctagatcggggacagcgtggctcattgtgaaaagttgaaggttcagagggactgggtttatggtgtaagaagctcaaggatgagtctgatagtcctagatttccagagttgagaggggggtcgagctgcaatcaataagactcggaaagcttgatggtggagtagcaaatgcacagggcgctcgcccgcaatcgcgacaatataaaccagacgcttttcagctgcaggtggctttggaaataacgaataaagaggatcgcccaagggtcatagtatggctcgctttgctcatgctgtcaggtctcaaagacaatggatgatcggcgaacggaatgagatggatgtccttatgcctcaggcacacctcacgtaatctgaatagcttcacgccctgggctattagtgcatagcgtattcattggggtgtcctacatggttacagatggcatttatgcttacagatttattagacagagctcaatgaggtagaaagtattcaatcgcaacaactttcgaaacttgaatgtacatatcacgccagtcggggtatcatatcgtcacctttcaaagcagacagaaccagcctgtacccatggcctatccagggaaatcgaggaactaaaaagatgcaaagaaatcaaagaagaatagtacagtcagtagtcctcctgcacccatgaacgccagcatccagtatccagtacacaccgtaaaagctcaaaccttttcaaaccacaaccgcaaacaaaaaaagagtcgtcataaatcatcgcctgatatgcgcaggttgattgacaagccaatcaagaggcagaagtgaccggggttttgcggctacctggaacagcagatcttttgcttccatccattccaccagcagagatatcaggctccccaatggcgtcaaccgatgaggatgattccaaatcggtcgcgacagtcgagaaaagaataccaccgaaaagaggttggctctcctcgttggagaaaagtccaccgccgtttcgaactcccatggcatgcgacatctgctccttgatgcggacatatcgatacttcgacttggtggtgatgacggggtggcgcacaaggggttggggcgcagaacgggcaatggcggccatgacagcgtctctttcttcatctgagtcaataggaccggtgttctcgatatcttcctgcagaggagcgttggcatcgatagccgcctctgtggttcgaatgggttagtcatctcgtgatctataggagcagcataaacaagataatagcaaacttactctgctggcgagcctggttcttcttctgatactgctggagaagcatatcatatggcagtgtccggccaggaaccgaacgcttggcacccattgaatggctcttgcaggtcaaggaacgagcgcactgcgcgccgttgggaagagtgacaccgcactgtttctcgacatcgacagggcccttcggtttggccgtcttttgcttgacctcatccttcttcttctttttctttgactccctgccatcctcttcatcggccttgcgcttcttgcccttcttgttgccgtcctcggtacccttggcagcgctctttttggcgcttttctgacccatgttagggttttctccgtcggccttatcggcaccgtcatcgtctctatcatcgccggccttcaggcgattggccgcgtcgcgggcttccttcttcttgcgcgccttctcctgcttggccttcaagcagccgcggacatgatcagctgcggtttgcttgagagtgggccgtttgcaatgcttgcagatgacggtctcgaggaggtcatcttcacgcggcttgccggtcgggaacacggaaacgactttgctgtcgagggagggaataggagaggcggtaggggaggtatcgatagggccatctttggcttctattagtttgttagtatcattaattcctgtgaaagcatatccagggagctttaccatctgccttcttcttggtagacgccttggacgtcttcttcaccttgatcttgccgggtttagtatccttgtctgtgaaagtgtacccggacgcatcaacaagacttccccgtcctgtcaaaaaatatagaattagctcagatcatttgtagatcgatgcgccgaacttgatctcgaagtatcctagatgctttgcgcttgacaggaactaggtattgcttaccttgaccggggtcaccattgttcgccatggtgagcgcaaagggagagagtaccgagagacagaacgctttcttgtcactcggaaagcctttgaaatggcgtgggggtgtttataaaggaatgagttcagtcgccggagtcaaggtcgggctgggctccgcgttaggatcagtcacgtgccatctgttgatctattgaataggcactttggcttctattttgctctgcgtgtaacatttaattctattgatgagaatagctaatggtagagactgatgttcttccaagcaatttcttgatacagtacattgttggtcaatcagattaaccaggcagcgactctttttatgttgtaggcaaatcagcacctgccaagcttgtaataagagagttataatttgatggcattcaggacgttaagtatcgcatatagaattgaatgatacgctgccctaagaaagagtagaggcttcatctttataggctttaagattaatggtaggccgaccagcatagaataatagtcaagtcaaaggtagcatacttagtcgcccgtgcttctggctccaaaaacacattgttgtactcaaacaaatattcatacaatatcatacatgttagaaacaaatatcatgaataatgtgcaaagcaaaggctactgttagtgccaccaaaaccaaaactatttgtcaaggcaacatcgatctgtcgtgactggggatctttcggcgcatagttgcaatcaaacccatcagccaagcgatctaggttgatagtaggtggcatggtattctgttcctcgttagcaagaacctagcacagcatgtctagtgtacagccactcacctcatggattgcaagtacactgatcaaagcttctatagcaccagcaccaccaagcagatgaccgagggcaccctttgtgctgctgacgttcacatcagcagccttatctttaccatcagggccaagcaggagggccttgatagcagcgttctcagcagcgtcaccgacaatagtcgaagttgcatgtgcattgatatagtcgactgcagcaggacgtaactgggcttgcttaagcgcctttttcatagccataaacgcgccttcaccattttctttaggcgaggtcatatgatgtgcgtcgctggagcagccataccctttgagttctgcatagatccgcgcccctcttgccagggcatgttctagctcctatactttaggcgtcagtatcgggttgtagtatgcgtataggcaggacatacctccagaaccatcacagctgcaccttcgccgactacaaagcctgcacggtcggcgtcgaacggccgtgacgccttctctggagtatcgttaaaccccgtcgatagacttcttgcacgcgcaaagccgccaatggccaaaggatggatacaggactcggcaccaccagcgaccattacatcggcatcaccgaaggcgatgaaccgagctgcatcgccaatggaatgggcaccagttgtgcaagccgttgttgcggaatggctcgggcccatgaacccgtacttcatagagatatgcccagcgccaaggttgatcagcagcttcggcacgaacagcggattgacctttttgtagccctgtgcaataagttagctgtatgttcctagatcttatacgatataaacttacacccttgtcgtaggcaataactgtgttgtagatttcatcaaaattcccaatgcctgatcctagacagattccctatcaaaatggttagtatagctgtcaagcttcacatattcccacacatactgtggcttccctctgctcaaaaagcttgggcttccagtccgcatcttgaagcgcctcttccgtcgccgccatagcatactgtgcaaacttggccatcttccgctcatcctatccattccaaagtatcagcatcacaaataaatcacaaatcacaaagtgaagatagctggcttacaccccgactcaaccattccgaggcagtccatccaccattatcgcgattgccctgtgggacaacggcagcaacctgacagggttgctcggcgaagcgctcatcgcgatccttcacattcacaacgccgcaatggccatctaacaagcgtttccatgtacgccgaatccctgcagccaaacccggtgttagtcacagtaacatgcgcatgtgaaacccagtatgtatacggcgggtaatgtctcttatcttcccggtccgcattcccctcattggctgtcacgaccttccccttccggagtgggaagtggagaacgaagaagctcgacagctcggagtccggggatatcggatagagctcccggacaattagagatggatagagtgtgctggcattgtcttgctgacagataattgccgaattgtgtaattgcatgcattgtacccggtcacatgtccaggtgagctccaaggatgacctcgaagctatcgatgccaaaacaacaaaacaaaaaaaagaagcaactcacctacacctagcggtgtcaccgccccaagaccggttacaacgactcgccgcattgcatcgttaataactttgtataaaagctatcggaggagttgtcaaaagaaagaaaaccgaaaagcgggccacggccaagaagggaaagtcttcacgatcgggacaaccctatctgttcgtctttccctttacaacactactgcttcaggaaacttgacgagatgggggttatgtagaaaaataaatctcttcatttccatcttctcttttacttcatcccattaacttcagccatgtctgcttggaaaaccttcctcacactggctttggccggctccgcggccgcctgcgcgcaccacgataacggcgaggtagtgcccgaacatgagcgggcggaattactcaagaagtgggatcaggaggtatgccaatgctagaatatctaaggaatgaggtccgaacgactgctaacatgtaactatagtggactttctccggcattgccagcttcgcccacctgaagccggtcaggtgtcttatcgagcccgatgagaactacgacattgccattatcggtgcaccatttgatacagccgtcagctaccgacctggtacgactcaccaccaccacatccaacatccaaaccaaacctacgaaacaaaatactaacaaacccccaccaggtgcccgcttcggaccacgcgccatccgcgccgcgagcgcacgccaaatggccggaacaggctacaacacgcgcgccgggatcaacccctacctatcctgggcgaagatcaccgactgcggcgacatccccgtgacaccgttcgacaacggactagccgagcgacagatgtacgaagcgttcctcgagctcggatcccgcagcatcgtgaacaaagcacccaaggcgaacgggatcggcgcccagcaccccaagctcatcactctaggtggcgaccacagcattgcgctacctgcactgcgggctctgcaccagatctaccagaagccgatcacggtcgtgcacttcgacgcgcacctcgacacgtggaatccggtgcggtacagcgcgtactggcagtccgagcagacgcagttcaaccacgggtcatttttccacaaggcgagtcgcgagggactgatttgtaatgctacttctgcgcatgcgggactgcgcacgaggcttactggtgttgatgcgggggattatacgaacccggggcctgagcagggattcattcgtattcatgcggatgatattgatgagcttgggcctatggggattgttgagacgatccttgcgcgcacgggcgttgatcctgagcagcctgtttatctgtctgttgacattgatgtgttggatcctggtacggcgcctggaactggaacgcctgagcccggtggttggactacgcgggagttcattcgaatcctgcggggtttggagaagttgaatattgtcggtgcggatattgtggaggtttcgccggcttatgataataagggagagactactgcccttgcggcggcgcaggttgcttttgagattattactagtcttgttaagtctggtgttgatgaggagcttggtgggtggtatgggtggatggagcaggaggagagaaagaaggagcaggagggtaaggatgagctttgagtctggacatttggacatttagatctacgagatgcatgtggaatgaagtgaagaatgaatgatatctatttgaatgattccttccttgcctgtagactggagtgatgtcatggcacagtaggagcctgaactcatttagcctatgatctcacagactcggacgggagtaaccttggaaatacaatatcaaaatactacaagctacgtgacagatacacgttcaacccaaatgtcttcatagaactggttgtattggagtctgtaactttctaatgacccaaaataacgttgctcttcagtgagacataactcaaaagactgcaagagatcgcagaaaggacgtaaacgaagacgcttgtatcaagaccgcgcgcatggagagtgatggcgattgtagatcagattggagtagaggaaatcacaagcaaaaagacgcagagaagaagccggatctgcaagggaagggtacagcaagctcaaattcatagtccggggtcgcaaagctggggtacataaatagcacgcgaagaagaaaaggacaggggcatatgggggatatgggacaacattgacggaaaccgtccagccaaaacacgacgccctgacgtccaacgccgagagagacgaccgaagaggtgaaagtgccgggtgcggagagggtaataggtgatatgtggggagtgtagtcgacgcgacaaaaaggggagaagaaggtcaaaattgctgtcgctgtagttcgtgaaggagaggaatgagggtagaggatcgggatcggggaaagtaaaaggtaatagacgagcaccgaggtagctctagaccaagtcgttgaatatggcaggtagatgcggccaggcgaaccaagaagaaaagtagaagcagagatagagagcagaaaagggacaaggcaaactagagagattagggctcgaaccgggatatgcgaacagagacaaaataagagagaaggaggtcaagaaaaagcacagaagccattttcaaccggaaaacgtagatatggaacgcttcagatagcatcgctagccataatacaagaccacactcctcccccttttttttgtcgctgaatttggatatcccagaaaaccagtccagtcagaaatatttgccgcccaatagaacgtgaagagtagaaaaagagataaacaggttcattccatcgtagctgcttcgaggcgcgcgtcaaccaggcatcaacccaagtgcaacattatccgtcgcactcggaccaacccgttgcgataaatccgtgaagggtaacttcacagcaagcggcagccccttgacttcttcttgggcgcgggctcgagtgccgcgacaatagcctagaaaggtagaaagatacggtgtcagtggcggtgtggagatgtcgggcagcaaaattgaaagactcggtgtacctcatcaaagacgtccttcagcttgtactgagtcagggcggaacattcgacgtatttaacggcgccgagttccttggccatccggtcaccgtcttccttgcggatgggggtcatcttctggcgagcgagtttgtcccggactccggcgtcatcgcgtaaatcggtttgtgtgccgacgatcagacagggcacaccaggacagtggtggtgcacctcggggaaccacttctcccgaacgttttcaaaggaggcgggcgaggtcaccgagaagcagaccaggaagacgtcggtctgtggataagagagcgggcgcaggcgatcgtaatcctcttgaccggcggtatcaaacagtcccagggtgtaaggctcatcgccgatcctgaatttggagagcgatcggttagaagtgtttctttgaggctagactgacgtataacttttttcttctcgggggggaggggtggggagatgacttacatcacggtcacggcgtagttgtcaaagacggtggggacatattccgaagggaacttgttcgttgtgtatgagatgagcagacaggtctttcccactgcaccgtcccccaccacgacacatctgggttggggttagccatgagatctggggggtttttttcgcctcggcaaagagtgaggagatgaagcgagatggaatagcgtacttgatggtagcgacgaccatgttgaattaatgagaagtgttgatgtaggagtgttagagaagagaagtgtgggagacaaaaagggaggaagaagctgtggtctggattgaatggggcaacccgcagagtatggagtctagacacggtgctagtttcgatacacggtctgtacagcactcgcttgcttgaacagcttcttggtattaattgtgttctataagagataatttagatctagcattgtcgtttctcatattttgcactattctatatgatctaatactcattcactatgatatttgctgttgatgtcattcattacttgccaagagaacggtatcagtatctcgactataaatatcagctcaagcgctaatcccctattctattctttacaattgctgtatcttggagactcgaatttaggatatgtaggggaatgacagcttcaagtcagtaacaggtgcaagtacgaaacacccatcaccccaataataccccaagtaactataacttcagtataactagttaagataagccccgtcgaggaacaaaaggagacccccggggtgtttaccccctttttccttcgagtcgactatttctttcacccttttggagaaaagaagcaacatgggaaataattaaaaaaccccccaatttcattctcgtttcaccattcacggtcccccggcctcccctcggccctaaatccccccctttccaaaccgtcgttttacatcgtgtgatagagatccgaggacctagatggataccataaaatacaatccatagtacattcatacggttgacgatccaatccagctctcattattacctacgttgtactccgttctccgtaggtgccttgtttccatcacagcttggcagcccgatccaggtccagtctctgcacgactagcttcactacgttggcagagcttgccctggcgggtgcctcatattactagctatctaagtatagcgacctatgtcacctatggttctgattgatggcctgacagctgacaactgacgatatattgcaggatgcgtcctccatacggaatacctccgtacaatatacattgattgacagtaagcacatgcacatgctaggggtgccgggcagatccaattgccatctcatgtatccccaagcccctccgtcgcggtatctggtctgcatgcatgcatatatatgcaggtacataggtacatgcacgggtaagatacgtggataagacgtggtgcgtatgagagtcctggtatacgagctggataaaggcggggtgataggctggatggagaagaaaaaaacaaaagattcacgtatttcaacctctacaaatctagcaaggctttccggattggaaataaagtcgatatccaaatccaaatccaaatccttcccgcatgacggatagcagtggatataaggccgcgatgcgtgaagttcgggctggactagactgggatatcttcataggtcagtgcaaagtacctctggtgtgccacaccggggcgaattaactttatttctgctgtttcagggaaatgaaacccactaggccgtaactgcagaggatgttacagcctgaggggcttagggcggcaagccggcgggatcggaataatcgtctggttttggtgatgattttgatcggaagcgccggagcgctttcaaggtttggagtgtgcggatcatgcttgactaggtggcaggacgtgggtgttatctttgtcgaggttacaaatcactacgatgtgtagggcaatgtagcagggcaagtctttcgctaactcgggtattcatattttcggcgttgataactatctcaattcattgagctgtttcagtcgtagaaagatagatacctctaatcccgtgaatacgtaaatagtaacgccgaatgcaaatggtggattggctcgcgtccaatctgagtgaacagaatataacccgaaacgcctggttgtatcgagatgcaaaaattaagccatggaaaagccatggaaaagccatggaaaaggcacaaaaaggttcaattcgtaagatcgtaatcgtctgtgtgttgagtgcacacaggaattccgggtttaggtccgtttggagtgtccctcacccgagttgggctctacttctgcctcaactggaggcggggcgccccgccgctcaggactaccatagcccatctagaatcaagtcagaggagatcatcagataccacggtttggtgacttaccttgtcaagtttgtagtcgaccatgagaagactcagtggaatgagggggagggtagcgatgacagccagcgtcaacagcctgttcatggtctcttggtacgcacggttgatagcaatgcgagttggagatcccattgggtacgacagagcggtggtcagcttgccgaagatttcagcagcttggcccttgctttcctcggggaggtagcggagaagcttgtttgggatagcagaggaccacacggctccggagatagcagcgccgactgcaccgcccatctccatggaagtcaggaacatcgcagtggctgctgcgacttcctggtggctggcggatgcttggacgcccagttggacgggcacgttaaccagaccgccaccgatgccgaccatgatttgtgtgccgaggacttggaagtgcgaggctccttctcctcgacacatgagcatgagggctaggccggtcatgtacacaacacatccgatggtaatgtagatgcggtatcgccgggtatacttgataagaagtgatacgctgaatgcggcaatggttgaagtgaaagagaaggtctgggtgacgcgcccggcagtggcaacgtcatatccttgtacaacctgcaggtaggaatagagataaggttgaacggagaagtagaaggccactaagtagggttagcagggacacctcgaaggtagagagaataatcaattcactaaagtaccagaacgccaatgcacaacccgcaagagcagttctctgcttgagcaggtgtagagagagcaagggcttcggggccagtttccgtgaagactcccagaacggtagcagacacaggcaaacaataccaagcgcgatcatggtcaaaatactggtgttctgccacccgttctttgcggaggccgcaagagttaaaggcaccagaattaatgtgacggcagcggacaaaagggccagtccgccaacgtccagatcataccaggtccgacgcacgacgctgacaaaatctgttcgttttctagtacgcttcttgatcaaattcaatctctgggccttgcgctgattgaagagcagggtgagggcgagtggcaggaaggatgcaggcaagataatagcccacattccataaccccatcgccatgaactactgcgcagcaccgcgcccgcaatagtcggtccgagccagaccgtaaccaagaatgggaattcgggcagtagggcgaggaaggcacggttcaacaggtcactgctgtcggcaatgaatacttgttggaggatctgcaagcccgttgagccggcggaataaaagatttgggcagaggcgtaggtttgaacgttggttgagccggccatttggatgtatcctaggacgtatataaggatgctcaaacagaaagcctcgaagcgaccgaatacgtcggcgatcttagccatcgggggtttgatgacagctatagattaaggattagcagccgcttattgaagcggggtagtagatctcaccattgaccacattttgaataacgaggacggtcgagatcaatgaatgtttactgaatgaactcgtcgcatatgcagacagcgacatcacagtctgaccttccagcgacgtgcagaatgccatgaggaatatactttgcgctaagtcagcaggggttcggcaagaaagcatgggactgcaagccacacgaacctgacgtaggccaccattaaagacttggtcgtccaagtcagattgatggcttcaatcttttggactccctcctgaacttcatccggtgtagacaatccactaggctggccctcgacctggtattcatcctgcaacagttgatcccgttcatcctccatcctggcgcttccgtgttcaatagtgccgtaggacggtcctgagcttgaatcgagaagcggcatgtcgcgcgttaccacaagatcgtatacgttggaagtattctctaatggacagggtccatataagaataaccggcaagagagttcggtctgggattggtagaaaccatatacgaaagacggcgaccttaaaagcgacgattaagcgagaaacagaccatcaaaaaaggagttcatgcgatatcaaacgtaagtagcgggtgtatcacataaaagggatggagccctgctctaataagtagtacttttgctcttcagctagatagcccgagccactcaggtccacagagaagaaaaagaaatgacaatacgggatgtcaacggcgaatcagagactgatttaggacaggacaagaagaaaataaatatggggcgtgatatgtaaaaagatgtcgaagcgcgcttgcctcggggggtcgacccatgaagggctattaatattggaagtaagtagcaaaatccggtaggcagctatggggcaaaagatttggcggatgggtagatccgccgtgcttcggagggcgacgccccaaatgtaaggggaacaggccttgaagagtttaggcttgccagtctgcgcaaaaccacaccaaccccgatcgtcggtcgcacttatgcacgctgatggggtctgtggtgtagtgaggtgagatgagaggctgaggtccgatctcagctcgctctctagcattccaggttgctgcaccaggacagtttaagaaacagtgtcacgttgcaatccagtcatcattctgggatctgaactgcccaggtagttcccatgtattctccgcaaaagagatggaaaatgtgtccaagagagaaaatgcaaaagaggtggagtttcaggcacggggagcggaggggcacccgctgaatacacttgttcactcggtggcatgagctgagtctttggtactgccaagtcacggtttccctggttcacgtcatcagataagatggaaccttgatctcttgatctctgttatttgtttccaaagagtctcttctcatttcgaggacacttcgctacatcataatacaatgtctccactatgtggcagcgacatgcattgctaccctgtcatttattacctccgatctagggaattgttagccggaatgacggggccggtcacttgacctggctatatcattttcccttctatgcacattattaatgcactccgtagttactccgtagtatttgatatactttaacagcggaaatgaaattgggaaaaggaatgcaataattggatggcatctttcatttaggtacttctctccacttgtgtcatatccacacgcgactggtgtgacctcggcatccgaaacagggcctgtgggcgcatacacccgattgtcgggattacactgcactgggtatagtaggatcagatagctcagtgggaaggtgtaggaatatgcgctctaatgggtagtatacacatataggatagaagaagaacagcaagaggacccgaagtctatatatccactataagtattcaggggtgcccaggagcgcaatagacatccgatatagtgccaagaacgctaaaaccatatgcaatctaactatcctcagtgttcaaattagcataacctctctattaatgcatctggtaaccgcaagtgcgtcagcatggctgatcatccaccatgacaaagaacgaaccatgaatcttggaagaaagcaacttgattgactggaactatccgtacatcggctgatcttcgccatgtcagtcatctttagcagatacacgaggtggacctggaactctgtggagccgtggtacatatgtccgcagcaagccggtatccttatttctacctgaatagatcattaatggcctgccgtgttccgttgcaacgtatgatcaaactggtcttactttacaacatacttcattccaatcttcctattcgtcatatatactgttgtctcttcgcagtggccatcgtcaccttattgaggcatataactaacaacgtcctgctgacctattcctggtctatgatcaaatgactgaacttgacagaaagctccccgccctcggttgatggccgggcagcatagataccaacccagaagtcctccacattctcctgttcaaagatccaagtgacctcccggataggagacttctgcaagccctcaacaagatagatccacagactgttgtcctcttccctgaccagttcaagggttgccgaaccactacctgaaggcactggaagcaaactccagtccgcccagttatctttggcgacgacgctgaggtggggtttgccgtgggtgagttcaatgccgcacttcacccacttctggccaccaccagcagtattgaggacgagcactacaccaccctggtcatatttcttctcccaaaggccagtgacggcgacgcggatccgcttgaatgacttcagcggcacggacttatacagaatcggggccgagaaggagatcgtggaaggtggcttggcccaaatatctgtggaagctggtgttttgatggtaaactccgcgggaaggacacctttgcctggcacttcggcatcagaattggcgaatttgaattgcgattgcgacatggtgggctgtggaatgcggggaagccgtggtatattcacagatgaagtatattcaatcaccacgccacggatacttggtcaagtgggtggtttaggtggaagattgggattttagtaagtgaataaagagaataactcagcggaaagataaatgatttcgcctaggcgccaacagaacaggcaagtccatgggtgcccggacgacagctacgtcactacataccgggacttcctactgcggttaaccaaatgatgaaatagacatagagctctcaatttacttgttttgttcaatgttttatttcccgatctagaacgtatttattgaagcccagaaacatttgggctcgttatattcacatcccaccgtacagagtaccgaggccaaggcaatacatgtaccgcctaatgtaatagctataccgcccggtgctttccaattattactggcagacaatctaattgccggcagaataataatcgcaagttgtctgacaccacgtgatggcattgatgatgtaagttctccatggaggcttgctttttatcatcaacaatagctgcaatgtgccagcttattgaatcaatttgcagctaaagataggcctaagggtgtatacccatttggtaccacgatccgccatgactgcacgactactgcatcccgatgaatgggagcttgcctcgcggtcctcagttgactcgcaggggacgttcaatctcgacgaggccgatttcgaagctcaagtcccttcttcatccaaatttggtaaacgaaaactgccctggctgtcccaaatcttctcctcggcatcggcgggttatcgccgcctgaacaacacttccaaaccgattctcgcaggcacaccacgaccgagctgttctcgacgtctctgtattcgccgctgttgctacctgcccgtcgtcgccggcatcgtttttgtcctcgcgctctttacctcgctactcttcccgtcatatacccatctacccgcgcattactctacccttcgcaaatcagtactcgagagctcataccccggacgaggcaatccccgcaaggagaaggtctttattgcagcaagtctgtatgatagtggcggcaagcttgctcagggccaatggggaacacaactcttggtgctgattgatctgctcggtcctgacaatgtgttcttgagtatctacgagaatgacagcggtgacgagggagagcgcgcattgcgcgcgttagaggagaaagtggagtgccagaaatccattgtgtctgaaaagcacctggacctgaatagtataccgactgtgaccattcctggtggatcaaagcgaatcaagcgcatcgaatatctggcccaggttcggaaccgagcattacagccattgaccgaccacccggagatgaagttcgataagctactctatctgaacgatatcctcttccagcccgccgaggttccccagctcttattctccacaaacgccaacgaggacggtgttgcccagtaccgtgcggcctgcgcggtagactttgacaaccctatcaaattctacgacacatacgccacccgcgatcttgaaggttacagcatgggtcttcccttctacccatggttcacttcatccggcaaaggcgagagccgaagcgatgtgctagccggaaaggacgcagtgcgagtgcgcagctgctggggcggaatggtggcatttgatgccaaatatttccaatccggctcgccacccacaacgcctaacccagctcgcttccgctccggacaggatctcttctgggaggcgtctgaatgctgccttatccacgcggacatccaagacccgcaaaccaacatcgacgagatcaccgatacgggaatttacatgaacccgttcgtgcggaccgcctatgactcccgcactctctcttggctaggagtcactcgccgcttcgaggggctgtactcgttcctccacaaccttggcaatcaccttgtcggtctgccttggtacaatccccgtcgtgcggaagtccccggccaaattgtgaaggagactgtgtgggtccctgatgctgcgcaggacggtaacggctctttccaggttattgatcgggttgcgggcaatgatggctattgtggtcgtcgcggcctgcaggttattattcaagaccgtaagcccgggcagaaaggatacgagagtattcctatcccatcgtagacctggacattttaatgttgtggaatcagatacccattctatctattcttgttatatagatttgcttcttttggtttttttggtgtattgctattttctagaaaagctttaggagcattagatcaatgcataatttgtgagctgataattatttttcctccttcgctcagcaaaaaatagagtcgttcaggcaagggaatactaactaagtaagcaagtaagcaagtaagcaagtaagcaagtaagtgagtaagcaagtaagtaagtaaacatataagcaagcaagtaagtaaaccgcggcgtagccactaagctgggtaggttcgaatgcctaaaggcttgtatagagtatagaacctaggctaccccctacggtaggtcacattaggacaggctttggttcgtctactcccagcaaactataacccgtatgcgtcaccaccccgagtggtcgcttacaggtagctggtatctcttgagtctagaccacttaaggcgtgctgcgcatataagagcgaaatgtttccattccccccccccatttcagatctaatggaaatgcacagtatgcctatgaagtaattactatactaacacactacaacaaaatactgaggacttcatcatggccatcatctcagaagcattgatctcagtctggtcacatctgccagccatcctcgtcacccttgttatatttcactttgggcgcaaatatctcaacccaggattaacgtccatccccgggccattactagcgaggataacgaacctctggaggttcatcgatgtcgccaatggccgttcagaagtgacgctccataaccttcaccaaaaacacggggactatgttcgactaggacccaacgtggtcagtgtgcggaatttggatgccctgaaaacaatatatggtattaataaaggatatcaaaaggtgtgttcaaattgcaataactgattgatcattctgctaatatccgcaagacaaacttctattctgttcagcagcagcttgtcaaaggaagaccaacgcctacactatttactacaactgatgaagtctttcatgctgctattaaaagacccgtctcgtcagcttactcaatgagtaccctgactgaattcgagccttttgtcgataagatcattcatactttatttgggagattggatgagttcgtagctgaagcaaaagtctgcgatattgctgcttggctacagtactgtaagtctcactcttctcgcgacatgagagcggaagctgatgcagctcaaaaagatgcatttgatgtcatcggagaattgacatttagtaaaccactcgggtttcttgagaaagggaatgatgtcgacggaatcatcgtcgcattggagcatacgcttgactatgtcggaaaggtaagtattgggtgttggataaatgacacgaaagctaattagagtgggcattagatcgggcagatgccatggcttgactaccttttcatcaagaaccctctcagaagcttcttgacggggggatcgaccggggctgtggctcgctttgctcgcgcaagactagacgaacgattgaagcagaaaagcacaccagtggccaagacacaccaagactttctcgatcattttctgaaagcgaaagacgagcatccgactattgtggatgacaaccaagtcctctcatatacgatcagcaatatgaatgctggctccgacacaacggcgatatctctccgagcaatactttattacaccctcaagaacccgccagtaagtataaagctgcaccaagagctcaccattgccttgaaagaaaaccggatctcggtacctgtctcatggaagcaaagccaagagcaactcccttacctcgatgccgtgattaaagaagcattacgtcttcacccggccgtgggattgatgcttgagcgagttgtgcccgccgagggactccagcttcctgacggcggcccattcctaccggccgggacgatagttggtgcgaatccgtggatagtacatcgtcatcgggtctttggggaggatgtggagtcgtttgttccggaacggtggctcaaaatggataccgagtccgaggccaatttcctggacagaaagcagaagatgcttcgtgcgacgttcactttcggagctggaccgaggacctgcattggtaagaatatcagtctgctggagatttataagctgattccatcgctgtttctgagatacaaggtaagagtatggttccagaaacgagatttgactctaaccggggcttttgcagattgaattcaatgatcctagtgcagaatgggagattgttaatgcgtggtttgtgaggcagaagaatatggatgtgaggttgtcctgtaactgaggctatagtagtatcatgaagttggacagcggcgaccaggggaaggactcgaaagagcgactcactctctattttatctagatccaaatgttttgttttgcagagaatggctactgagactataatagctgaagctaccttgtcaggattggagagctgtcagtagaagaagactgaagaagaccgttctcggaaggtaccacaacgtgcctttgtcctatagttccggtatagtagctgacgaacaagacattgcctagcacacaatgagacaagttaatacaagcacaaggagtagcagaggaataaagaatgctgtttgcttacaggatatttctttgtctgacatctaaagaacagtgggatatctaatatgtgccctataggaatgactccgggccattctatcttgatgtctgtcttctaacccggtctttcctgaatgaaacaagtatagccagaatattaagaaagcatgaagcctttgaatgttccttcccgtcttgcatccaattgtgccttcctaattcgaacacagaacgcatctgttctacgcgggtactccaaataaaatgttccgttttgttcttcttcttcttcttcttcttttcctctccccatcctgctacttttttcgttccatcatggagacaaccaaagtcattgggcctagcggccttgctccaattactctgcagcgattggcagagattcgcatcaccactgaggtcatctacaagatgatcaccaacagcaacatgatcagtctggaggagagtgcccatgctcctattgatgtccgtaacaaggctcgtgctgatcgcctcgctggcgtgcacacggtctcagcttccctgaccactcgtcgttttacccagatgggcttcaaggagcctaagctgtatgatgcctcgaaggatattgagctggccatgcaggccaaaaaggtatgtctcactcttcccaatgcccccaatgcccccatttcccctcatccattcctatccccgcccactacatgttatggtcttcttcattaagtcgcttccattctctcttcgtgttttgtccccgcgacttgatccccatttcttatcaacactcatctctcatctctcttcgttactcccatctcacactggtctttcataggacgagaaagctgctacttcccctgatgccgctcaggagactgccactcctcgtgcccctgcttcgtgtgcccccgccaaggagacttctggcattgatccgcgtgctaagccatttgttcctgctgccaaccctgctggatccaaggacaaagctggtgaatgcagggatacagacaacgactccaccgctggctccaaagcatcccagaaggccgagtccgtcgcggatgagcctactgactcttccaagaaacccagaggtgttactgccccagctgacttcatgaagcaagtccgtttgctccacctgcagaagcagatggcacccaaggttgtgcctaccggacctcctcgtcggatcgttttcggagatcttcctgactgggccaacgtctccagcatccttcagctcgtctacggcggtgctatcgagcgctcttggagtgaggatggccacgtcgtcgtgcagtttgttgagcaagacgactgcattaaataccatgagaaccactctgatggaatcaagttgaaggatggtgatgacgacgtcactatctctgttaccatgcccgaggagggcctgaaggacaataacgagctttcgaagcgtgtcgaagatggtgcttcccgcatcgtttgcctctctggcctttcccccggcttccagactagcgacaacgagaacatcttgggtattgccgctgaccctgcctggggtgccaagagcttcgaacgcatcatgatcaagcaagctgaggtaagtttgcagtagttctatgttttgagtcttactaaattttctttctttcaagtctggcattgacatccaggtttccttctatgatctccatgacggttgggagttcttgcagaccatcaaggagggcgcgtatgactgcatcgccagctttgaaattgatccgtaggtttccggtttgcactttcactctttctttactaactggtctactagatgcgctctcgcccagggtttccacttcatggatgagcccaacctgatgttctctggcattctcgccgttgactagggtatggaatttatccatcagcaaccgcggccgcgttgatagccatcatggcttggatgaaagtggaggggatacaaaggaaatttcggaattgagatcttgcaatttgctttcgatgggttttcagttagtgattcttcctcttgctaggacataattaatgaaacaattaaattcgatcaacccttggaacatataccgtatatagtagctgctacagtaacaaccttaccgtacaacctagatcttacactcgcacaaccgtgacgaaagaagcataatggcacataatatttaagcctgctaattggccgctttaaattaaattagtcataaagtatatcggcatttgcagtgcccctcctgctcttttcatattagtgcggatgagattcgacagcgcggaagagggccagtggtcgaatggagtcgaatgtggagttttcaggatttagtgcgaattgtagcgccggggatgtcgaaccgatgtggatagctttgaggtctaatttttagtttttgaattgcgttacttagtattagtatacgaaggatagtacaatgtacattgtacgctttgccctaaatgccatatgcagtatgacctcgcctagttataggaccgtgacacaatactacacttcatattacctatatcgtacagtctcaacttgcaatagaatgaaatatccataattatacaactagctcgtattattggcccccaaagtacagagtccaaagcacatttaccaaatttcccctggaagcgaacacgggctaactatatcatcgtgcaacatcatgcatacatactatgatatcaagcctcggcaatgcttcttgattctttatcgccacaggcgacctaatttaccttttatgacgcatttacaaagtacatcttcaacacttgacatcacacatcaatgaccccttattacattaggtattctacattacatccgccccacagcccgaaataacaattcatgcccactagaaataaagtcctcgaatcgggaattatccttctgtcaaagagaaagcgacagaaaagaaaagaaacgaaaaaacccacgatggagtccgcgggtgaagtcccgaaccccggcacgctaggaattgacaggatcggccccgtttatatgtctttgtttttccgacgatctctaggggttagcgagagtagtcacgatcaaaacggaaacaatagtaagattaactacggagtaactaaaacaattaactaccatataccgaaaagagaagccgatcgaaaaccacggcaattggcccaagcccgagtccaagcccaagtcccatattatattgcacgcacggctaagtactttgtacatacagcataagtaccaggacaacaatgcgattctttaagcccctgacaagtccctgatcctggtatgggaggctctagaagtagaagtacatagttatacatatgtgcctagtaatgaactaactaatacaaaccggtactttggctttccccattcatccatcccgtataagccgaagcgaaggcgaacaaagaacaaaaagaaagccaccaaaaaaaaaacaaataaaagcccctgatcaagtaatggaaatgtcagaatcgcactagataactaattcccacatccgagatcttcatactagtacggagcacggcggatggcgacggcgacggcgacggcggacggatatggagcacctagacgaaagatggcactcgccttgccgtgaaggacagggacccgcgatcgacggatcggagggattggccgggttgtggataggtttcttttcttagccttagcatggtctggctgtgttgactagcgggttggatggagtatggcggactactacgagtcatgttctgggtcaatatccagaccaagaatagatgaagaggctagaatggtctgaatggtttggaattggataggttgcgagtatactatctactagcatatgtatgcagcgataacggcgagtcagtcattacactagaggttggactatgttggatatcaataggcgaggatggaccatggcgttgctcgggatttggaataggaaggatgaaagtaggggatttgcttgaggtgtttgataataatgcagaggataatacctgattcctggataaagcattgaaagtagaaaacattcagactcaattcaacctcgacttttatagtaatatctagatctaaatcccgatgttttgactctcacggcatggatagctccacacaacatatagatattatagccccaagaaccaagcttggaaagtgtaaagtgaaagtgtagacaagaaaaggacaggaacccagatggaagatatgtaaggagagaacatcaaaacgacaacagacctcccacgctgaacagaggtatcttaataaagacgaagaccgacccacgcaaaaacaagacagacaaattgacctcccaacgaaaccacccgaaaccaaaaaaaaaaaaaagaaaatcacttccgtcgcaacggcaacgcaccatccccctccttcctcatccaaggataccaaacattagtatactgcctaacgccatacttcggcgtagcaccatgcgccgccgaggccccctcacgcaagaactcgccgtcccgcatgcgccgctgctcccgcagcgtcggacacttcttctccttgataaagcggtagaacttgcactggatgccctggaagccgctgcgctggcgatcatggaactggcgattgaaggcagcgcggacctccttccactcctgcgacaggtcgacgcggtggtaccagatgaagtacatttcctcctcctcgtactttggccgcggcggcccgcggcggtcgccgttggtcgaggaggcgctggagacgctggagtagcgctcgcgggagtggtaggggtttggcgaggggggctcggagagcgagctttgatttgtgctcgtgctggcgcggttggggtccgcgctggcgctggcgctggcggtcgaggaccggtaggtgaagaacatttggtgggaccgggaggggattacggtcgaggtgctggatagcgcgcctgggctggagttgtggtagctccggctgtagcggtagtctgggctggcgggcaggaagcttggtgagggctggtgagaatggtagctgtggcggtgggctgggattgaggcgtgctgggagcgtggagagatgtctccgtcgcctgggttcagcagggcgtcgattttcattttgctttggcgtgcggcgggcagtgttgcgtatgattctgcgtgtgccattttggaatatggaattgggccagtacgtagattttggacgggatttatagagaccaagctttgaatcctccccagaaatgctcagaccaggtctgatagtagaagtggggatatagaggtctatatcagagagccaatggacgattgggaagtacagaaagtaaggaagtatagtatgcgcttggggtaacgggcaaggtttatagatctctcgaaaaagaaaagaagatcagcccgccgtcttaaaggaaaaaaggacgcgaaaagatcgaaaaatagttctcgcagcgttgggtgcactggaccgactgcctgggtcttggttgtgttcctttggccccccctgtatagctgtgtaccgcggatacacaaggctcctggggctaacaggggtctgttatgaggtttggttccacccccagacattgaataatataataataatataggaatataggaatataggaaaataaaatacaaatacaatataataatatataatataataaatatatatatatatatataatataatataaaacattaatcggtgaaccggactgcgactccgttagtggagagaattattttattaattctatatcttttgaagatgtggcaattcggtctactccgattccttaacctttttcgaatccttctttctttgtagagaagtgatatgggttccaaggttggagcttctttaacgggacgatctttctaatttcttttttctgtattgtatatacagcatacatacatatgtgtatgcacatactccgtatgcgtaaaaaaaaggagggccacgcggtaaattcattttacctttagccttttgcaatcttagcgccaaggcgaggtgatgaatgacaaatcgtatatcaaaaagcagttgagaacatcgacgtaatgagaccgatatccaagtcagagagaatcattgctggtctttgggaccctgctgcatgagcgcttaggtgagaagctcgattgagcacctatcagataatgtagaaataaaaaaagaagtgaagaataggaatctcgtgaatttcaattcaatttctgctttagtgtcagtgtttcattctgtccaacacgactttgtccccgttgtaacttgctcatgtgagtgggtaacgggctacctgatactccgtgtcttttccccttccttattttttttttgaagtcagatgtagacacagtgcagaaatggaaaaggaaaaatgaaccaacacaaacgcgcggcgtctattggtagacgcaaagtctgttgctgcgacgtacgccatggccctgggatatcgggacgaatgagcgtgaggagctaatgcaggctcgatttggcactgccaacacatctgtctttcaaggcgcactatgaggtaagagagatccttgaagaccgtggcacagttctgctctatcctcttcaggctgacaatagtatgttgtacttgccaatacacgactactatatactacatatacttacctacaatctaactatactcttattctctcgggggagccgacaaagcggatttcctgcgcagtcaacttgcatgtatatcaaatccgtgacgatacatgtcttagcactgatcctgatgttactcgcgtgataataattttcctctgcgccattttccctcgatctgcgccttgaccaggccgatcgtcagtcatctgcagccgccaacggtttcctttgattttcttcacggtttaaccgttacgattctatttgaaacggaattaatataaaaatattaatctcaaggaatacagttgagtctattctcattctcatctcacctcatatcaatagaccgtatcatgtatatcactcttctaattagatccacgcaatctcctccaattaccagaaagaaaaaaaaagaaggaatagaaaagacgttctgatcgtatttctgcggcgcagtcaacttgcgcaagcgtgaaatccatcctcaattagggcaacccatcggccacctctgtatggcccgttgcttccgagaaccccccttcgcaagccccaagcctctcactggtaatcctagtccctgaagcccccaattccgtgcagatcggatcaacatggctccccccgggggctaaaaccagccttttgcccctccccactctgttttctttgtctgccgctctccactcgggacacttttggcgttcatcagtcgcgtagccgcaggcagattcggtcacgtgagggctagtgtaatatatgtttccctttcgtctgtacgtgtattgtatttgtatcttcattcgtatcttttccctataattgcttcgcttcgctccgcaatccgtccatgtagcatacactaaccattagatgcagataatacgcttgaccctcccaaagatcaactccttcctgaaccaacacgtcgtggccatccatggttggcgtaattaccgagtttaattatcgtcacatttgcgcgagtcatgccgtgcatattgcatgcccatcctgctccaacggttaacgtaaaaagaaaagaaaaagaaatgaaaatattggacgatattcgctcattaattttgaaattaatttcagaacgtgggcagattggtccaaaattcatgtatatcgatccaatcaccgtccccagtcgcttaacgtctgatttatttccttctttttccgtttcttttccgctttgtctgagccgcgtagatcggtgagatgtgtcgaaccctcccctttttttttgtacgtttttgtactttttctttgtttgcgcaatcctcagctcgaatcggcaggctcgaattccaaatttctcgttccccaggcctcttctgcagctcaaggtagacgtcagcagccaaggacgctatgtcctgttactagacgttagcgatagccgccgcctgccccgctgcagcacgcaattaattgagtcatatcggattttatagttatgttgcgacggaggatacctacggagtactcttaactccgatagatcgttacgggcattgtttgggggccgacctcgatctagaatctcattttaccagagtagatctggactcttcttccttcttcttcctattattcctgcctccgtattcgaaacgggctggtcccgtcgacagggggggtggaaatgactcgtttgaatgcgcaaatttccgaaaactgcatctcggatactacatggtagggatatcaggatccagcatgcccggcgaagatgcgcagtcactgcgcaacaacagtcgggaaacccacagtttcaagcgggcacagccgttgcctaacggagacgaaagaggggaatagattcgcttctcccccacaatgggccagacaaaaggttcgtctgtatccgtaaatccattatccatctgtcagtacctccgaatccgaactccggcaatcccccctgacggatgtcataaccggttggcctggattggctgtatacttccgagaagattccaaatagttcctagaaccttgagccttggagccttggcctttcgaaaccttctcccttccatagatcgagcttgaggctcgtttctagcgaacttgggatcggagtcgatcgtccgaacttacgccgaactgccagattgatataatactgtcttactagacgtgggcatttgcaatcgcagcatggtgcttgatttggcgtagtggagcatgcagttgtgttgtgaactggatatgttgacaacacgtcgataccaacttccaagtaaatcctgcattggcgccagaaacacctgaccgtagcctcctgcaagagaatcctggtcatcccaacgttggcagttgttggctattgggggcccgctaaaggcgcagaagccgggcgccagttgttgcaacatccgatcatgggtccgggtaatcatctcttggctgtgatccttcaaaatcaataatcatttgtcaggaataaatagaattattaatccagacttagcttccccgtaactcctctcgggcttccgcttcggatccgactcccctatttagctatggggcctattcaggcttttggtcgatttcagccgcacggtgccaagctaggatttctggcactagccacgacagagtatgtacggagctctgttgtacggagtacgtgtaatacaggtatccaatatagacgcaagtcgtacccatattgagaggctagactacggagacgttgattacggagacgttgatgtgcactattagtgtatggagttcaacacgtatatctccgctcccaagaccccacgccattcgcactaaactagtaaacgatccataaacgatccattaaacgggggccggccgaatcctgcacggttcgatccagcgcagctcacccgcaacgagagtggacgtgatcatcttccttgttttcggacgctctcgagtctcgacagactccgctgggcatattggaagtcgtgatgctatcatcctcacacttagcaccatttatatttcattcccccgtccattagtactattggcccaggtacgaatatcctcacgaatcaaaaacggggaaaatcacccgccaagcaagcttaatatctagtagcgactagtgcctccagcttcttttcccgtatctggcctagcgcgagggaaacataggtaccgagtacggagtgctgtctgtcacctttgtctgaaggagatccgagatctgacttttcggcaagacatgaagagggtctaggtgaagtcagtttgggccccccccccccccccccagcccccccnnnnnnnnnnnnnnnnnnnnnnnnnnnnnnnnnnnnnnnnnnnnnnnnnnnnnnnnnnnnnnnnnnnnnnnnnnnnnnnnnnnnnnnnnnnnnnnnnnnnnnnnnnnnnnnnnnnnnnnnnnnnnnnnnnnnnnnnnnnnnnnnnnnnnnnnnnnnnnnnnnnnnnnnnntggcccccccccccccccccggccagacacgcgcaaaaagagagaaaaaagggcaacgagacacggattttagtaatttccgttttgacctgagcagctcaaagaattccgaattctacaaatcgtttggacgccggattccgccacacttctggaatcgatcgacgcgcaaattcaaagaaatgataagcgaagcagcgaatggggatccccggccgaaaaggcaagaaggatacggagctagctggttatgggtggctcgctgtatttggtattttcattacgtttgttacgctcgctactgcttactgaggattatgtatccagtgcccagacgctaatacacatcggggcaatgatgttatattaccttggcaatatcaaccagcttgaactgaactctttatattgacattcagctgcgtggatccccaagtcatgatatcaacacttgagctggtaggaccgatatccacaagaaccctctattgaattctatactgtggacaggaatacgacatgatattgcctgatgtcttatccctcgaaatgctacaggattgggtatttacttcccttgtcgatcttcttcagtgccaggcgatgtgggtatacttcggtttcgcgtatggtttccccggtggttatcaagatagagtatataaatatatattgtgcccgaagtagggctatcatccggcgctattgtcatgttactatctaaagccaagcatcgcttattcctggtggagtgttgagaagtacgtataagcactagtcacacgtggttcgtgacgaactggcggaggctgtgcttattctcatgtcagatgatctatttcttttgttctccgtcttggctgttattgttctaatctgattgtataggggtttaggtttccagttggataatttatccgagatccatacacatatgtagtcatggttacacggcataccatataggtacgatatactcgtacgcagcagcatattatttccactacgactcttcaaacgatgtgtccgtgcagtactccgtactcgtacgagcacacacctgatatacatcatacagcccacctaaacacactaaccagcagatcttaattagataggcccacaagaccccggctaaacacacccgtctcggctcgcggtttgatagggcgtggatgcgagcttcccccgggtatatgcggagaacaaagttattgtatggatctggcctatcgtctcctttccggaagatcactcgtatacctgctccgtaacgcgcattgtaatggtcattgtggagacggactggatcctgccgaatatcagaatttcgaaatttcgaaatttccactatgggttccgatcagccctggcggccggatctgacatgggagatctgttacacggcggccgatcgaaggatatgcggtgggatgatgaggcgtcgtcggggatacgatgggaaagcatatgggctaggggaagtgggtttgcaatgcagggttaggaatgtggttggatgtgatgtgggttgggaagaaggggtggccgggatgtgcgtgcgtgtgtgtggaggttgtgtatgagatgtgatatggaggatccttcaaaaggaaatatataatactaaaaaagacagtgaaaaggacaagcccaacagtcacccagttggaattatcgccattcgtgaacagcaatagcatcaatggcatcaccgctccgacttgtgatcattagcgaccggtgatcagtccagcgttgccattgccattcatgttgtatacagcccgaagcagtcaacagtcactctgtaaatatcggtgaaaacaccgctcaataccgcacgtgcgtattacttcctgccccagccacaccaatcagccctcgggcattgacgacaatggaagcactaatgccatcagcacaccgaagccagagacccgggtcattagctccgggatcgggccttctggcgtgagctatttctgcactccgtttcggcgatagattgactttgcgccgttggatgttggaattagatctcgggacattaatgttgtcgcctcgggggtttgttgcctggatagtgctggatagtgagcgatgagtggttcagataggagtgggggcatgatttggtgtgtagcatctcttgagttgaggtcgtatttgcgtgatttcttttagcgacatcagacactgtctgcatcagggactatacctagttgagtaggtgattagtcgatagtgtttcttcatggatttctccgaaatctggatcagcaataaccccctcaagcttgaagtataatcaccaaagtacccgagtcccgagtatagcgtatccattctgctccatcctcgaatattattagcaaagtataatcgggcactatcgtatagtagacttggcatcttcagatgttcagtaagtcttcaccaccaagacagatgtgacgaattgtttccgacgttcccccgctgcaagagattcgagcccaatcaatagcggatactcgagactgcccgagcacaggaacctgacgaaatcgcacatcttgactcagtttggcaacagcctttgttcgatggttaatgctcctattggaccataacagaccggcttggataaagcggattctcgtcggtgactttggcctcatccattctccagtcggggcgttgcacggttgtttcgtgtttgagacgtgcagacggagtacagcgaggacatatcccaactccaaggggctgaaggattgggaatgatccgagctttgtattttactattttggtaattgcgttactgtaagattcattcgtaaattaccgctagccctttctttttcttcgtttctttcctttagagcctcacctcctcgcatcgactcccgcttattatatccgcccaacgagaattcagccattaaattactgcaaatgaaggccaaccatggaactagaccgagctatcctctagttgcatatccacacatcggggtagccgaactgaatgatatcaaggtgggttacggccacgtaggagttattcttcagtcgatcttttgggaaaatccaaacgtgaagattacagacatacggagtacatcgtgcacgggatctgcccggtttcatgctaaattctatcttgatcttcgcgactttgcatgtgttaggccgtgtgtccgggtagaaatggggctatttctgcaggatgtagtggggttggtagccttgtcttgcctattttgatcagtcgagatatctatccagccctgcgcctctaaaggctattatatatcagcgccgttggattgtgccattgcaatatatcagctggatcctatttgtcgagctgttgtacatgttggatagcgctgataccgacacctagagcgctaccctagtgaccgctataggatagatctcctgcatgcacaattcactatgtcgcatgcaggccgactgattcgtaccgtgtatgatctcggctttcggagtggactaaacaccggtgacggagtccatgagggagtaactaactatacggggaatgttgtatacggagtccggagtccaaataagggatcaccaaatcgtcatagaccaacgcgatgaaccactgtaaaatagattctccgtccaatagactaaatcgctgccaactatcaagtaccaagacagagatcgacacaccgacaggtatatttgaacacatgaccaacagcactagttagcgcagacagcaatagacatctctcatcgaatcaaccaacaccacaccaacaccaacaacacaacatacaccactgctatgttgtatatacccgccgtgctcaaatgacttcatcatatctaccccgcaatacatccccggctccctaaatctcatcacatccaaaagcaccgaaaacccacgtggcacgataactgactccttcctatctcgacataagacaagcgaaagccgcatcctcaacgacccccgacccttctggttggttccggggtagatcggagaatatgagcccacacacccttcatccttgactgcgtttttaaaaattttaacttccattgcctgatcggtttttttttcacggagatcctccgactacactttcttgtcttgtctggtctggtcttactagtcggttggcgccatttgagatatttttgtcccgttgtttttttcgcgggttggttggagaggggacgatcgggctcgggtgaaacgaaacgaaacgagacgagacaagacagaacggggccatcggcaggagggtatggaattggaattggaaaatggatatggacatcggtggggaaaagatggcttggattcaggttggatgtgggttttcggagctacggggttgccaacggcttggttggtatgtatgcgtccctacacggcctgggacgagatggatggaaaattggaaattggcaattgggatggtgcagtaaggagtgcacggagtagattgtagttttcgtctcgggtttcgatttccatgttggatcgttggtggggggaggggcttgcttttgatcctgattgtttacaacatacgccccaggaatgagggatatatctctttatcccatgagacgggagtgtatcgatatggatgattcatgcaccaggaggattctcgtgtagactccaggtaactctacgattgtctaatctaggtatcgtataccgagagtatcgatgcagccctcgttggcgtattcatacttcatataccttcctcttttagtccagtgtgcgtagcatgtggatatacctgggagtctcaatattagtcctggccgtctttttctcctgccgcgggatgcccaaggtatcttttatgtaattgatcaggtcttggctcttagcagctagctacgacaagtgaaaaagtagcacgaggcttgttgattcgatagaaatatgaagtaggtattcggagtaaaataaagcaaacgctcgatcaggacgtggaacaaaacaagatagagggacaacggcagtgtcgcatagcgggcagatcagtagtcttcatctgaatctacgtgctcgcggtaacgagacatgtacccagacccgccatcctcgctcgctgaatcgtcaaagtcgaaatcatcctcatcggacgacgcttcttcatcggggtaatcgttggctgggttgttttcggctgtagatggtcagtggaggtctatgaggggacgaaaacgaaagcggacaaagagaaggcaaagaagggagaaacatcacacaccattagagtccgcatcctcgctatcccactcctcctcgtcattctcaataaaatcctcccagatctcctcgtcctcggccgtgatgacaatgacacccactccaggctgagacttggcgagatccttttgctgctggtcggactcgaattcagcgagcggattcttcagcatctcctcttctgatagcggacggcgcacgtaaacgtcgtagacatagtcgtcctcgtcatcctcctccacagcctgttcagtctgcggcggtggtgtaaccgcgactctgggttccttgggctgccggggctggtgtttcaacggaggcttaggagccgtgctaaaagcaggctgtacatatgcaggcggaggggccggtttcacatcgatatccatgccataatcctgctcagcctcccgctcaagctccaacgcaatctgctcgaaatcatgagccagacgttcagactcttgctcccagctcctgtgctgtgtctgagcggatttctccaacgtctcagacagacgctgcttcgcagccgagacagcaccctgacgctcctcgcgccaccgtttctcagcctggttaacaacaggccgtttgcgcggtttaaccggcgacgggggcgtattatcctggacaagttccttaggctttagcgcgagagcctgcgcctccgccaccatatccgaaaccatagacgccttgcgcgagtgcgcattgcgctgcagctgctcaaccagaacagccacacccggcgcaggaccaccagtgcgccgcttctggattcccccaggcgaacttctcagcgagtcgagattcgagcgcgagatctggaaccggcgcagggcctgcgcgcgggtcgaggatgtctcttctgatgccgggctgctgtcacgcactgcgggttcattagtggtagtagctgcagagctgccgggctggatgtcggtgaaaggagaaggacccccgtagacggcacgcttgtgcttttcctccgcttctttgcggacggctgcgatgcgctgcgcttcgcggaattcggctcccggggacgtggcccgcactgtgggcacgcccgtcgaggatgcgggcgcgcgccggtttacatggagactgcttactgagcgcggggcgcgcaagagccgttgcgcggctggtgttgctgggcttgcgggttcatctgcactcccatctgcactcttcgcgctggctttcagagtgactctgtggaagacgaagtcggtgaagcgccgcttggtttggtggagtgcggattgaatgactgggtaggttagtgttggtggtcaatgtggcgggcgaggtttgatctagggaccgtttccgtgatattatgtatcttttggatgggtctacatcgcggggaaaaaacacgggaattgttcgtacatagggtttcgacgggctcttcctcgcgccgacgcttgatgttgatttgctcgggtggaagcgccatgatgtcaagttggcatgtattttgcgatgtggattgtggggagagaaggttgaagcattcagtttgatgtgtctgatctttaccgcatttggtctgaatgatcacatgatctgaatatagatgtcacgagtccggacaccagaactaagagggcggagtactgaattgttatatcagaatcaatcaagatcagcccctaatctggccaagatgatattagagccgttacaattaagatacaactactccatacaatgtctttaattagccgcaaactatagaactgcggtgacgatctacgactcttccaattgactggtgcattctgttctcatgtataattgcttcgcttcgctccgcaataatgtgcctgatctattatagatagatgatcatttacatttctaactaatgttccaagttgggtagatggccatttttctgctaataggaccaaagtcccaagtggtcactatgcaatgcgatataatcgccgccacgactcgtccctctccatggtcatcatccagtgaaacatgcgacgtactcacagccccaagcaaaataaagagatagaaaaagttcaaagatagaaagaaggaagagactcagggccaactagcaatacaaggtggtaagacaagatggtatgcaaaaggattaataggggaatatagaaatcgcgaacggaatatgtccggacgaagagtggaaatccaaaaagccaaagaaaagtaagaaagtaaagaaaagacaaggggtgaaagtgaaagtgaatagcgaagagtcagaaaggtaaaaagattatgaccaatacaagaaagaatcagatcaaatggggggaggaaagacatgacaatcagaagggactatatgtaagaagagagaataaagtggcattagggtcaccgaggacaagagtcgaaggttgcatcctcgagtgcgcatataattatttggctccgatctcctcttcagcccagccgggcagcgagttttcgttttgaatagccagaccaaatcctgagtggttcagtccaccgagggcagagaagctggagaagctgctctgaggctggtgggcacctgtgcgggggtggggttgaccagagacaggtccgaagggctcctgggagaatgagggcaggctgacagcccgtgagtgcgaagcacggggcacgctcagactgctggtgcttgcgtggtggccgtgtcccgatccatttgccacactcaggtagctgttggaggacttgtgctggtgcatagactggtccatgtgtccattcatgtcgccgttgctgacgctgttatacattgactgctgtgattgtgcctgcgcctgtagaccagagagggccatatggtcgtggagatggttctcctgctcctgggcctgatgagcagacatctggttcaggtacatcgtcaacgggttgcttgagccgatattcaggaccccagaaggagaggtcacgttctgcagcgggtggcgatgctgtccgttatgcgacccagttgatcccgatgccggggaaagggcagggcgagtcggacttgactgggagccagactggctgaggttctgctggaatccgttgagaacggacggtggtgactggccttccatgcctccgttgcggttctgtccattttggttgtttccggcttgacgcggtgggtttccgcagcggtcctttccaaagttgatcttgaaccgccggtagtcctcccgattacgcattccctcaatagccttgatggcattggcgatattcgtgaagttgacaaaggcacaactcttctcgcgcagcgtgttcaccaactcgatctcaccatactccgagaagtcctggcgaaggcgttcctccgaccaggcctcgtccaagttaccaacatagacattgcgtgacgcaccgccgctgactgctaacgcaatggcgggcgggagagggccggagtgtttgccccatccaatcttcaggcgccggttgtggatcattagtccctgcaggttgctcagggcgtaaaaggaggcggccgaagtgggatcgatgaatgtaacgaagcaaatgtgcttatctgggatataccgaacatggtgtagcaagcctccgcgaacgacattgcagatctcttcgatcgttgtttcggggtgaatgtttccgaggtaaatggtgcggttgccgagattgttaacaccgcctgctgtcgtcgccacggcggccgcggcaacagactgttgtgcaagggcattagaaatcagatcacgatccgccgtgttcagcacatgtgcatacccgggtgcgatgccgaggaactgggcagcattttgctgctgagtcttggatacatacgcacaacggtccttgccgtagaacacccgctttggcgcttgccattgcggctcctgggggagctgggtgacagacttcatggcattactgatcgataggaaatggacgaatccaatcgccttctccttgacgatcttgacggtgtcaatgggcccaaatttgcccagatcctcccgcagatcctcctcggatgtttcctcgggcaaatttccaagataaacattacgcgacgcgcccgactgttgaacagccagggcaactgaggtgggaacctgcgacggcttaccccagccgaccttgatatcatttcccttgatggccaacttcttcaagatggcatcggaatggaaatgagtggctgagctgctatccaaaaaggagatgaaagcgcagtttttatcagggagcaggcgcaccgactcaatctgaccgctacgcacgtggtttaaaatctcctcggcagatgtttcagccgggatgtttccaagatacacggtgcgactggtccccgacagcatgcccggggccacggacgcttgggggctgccgagacccccattgcccatcccaagaccattaatcggcgattgcggccccatcatctgggagatacccataccgtcaggtgacatcatgccatacaaaccatggttctgcattccttgcgtagggctgtggatatggttctggttgttttgggagtgtccattgccattggcttgtgagaagccaccgaaactggtaaactgcggcgaagcaaaagccgagggcgttcctggttggaagggactgcctaccagcagctgggaagggagcaggggggtgtagttcatatcgaagccggaagccatatcggagtgttggccggcggcagtgtttatagcggggatattggcgcgacgcgtattccggtccgagaatccttggatatgattggggtggttgttgttgtacgctccgtgagaaaagccagtgtcaccgttcagcgcgtatttagacccaggatgaattagacgcgaattgttcgggatgctcgatacatccgaggcttgcatggcgagagaaatccaacacttgtcctaagacaagaacctagtcttaatcagggggatgagaggccctgactaccagactgagctctgatggggggggggagaaagggaaaaaaaataaagggaggattatcagatcaccattcaggagatgggtccccacagctaagatcacagggaaaaatagggaggattcgggtggagaagaagggaataatatcaaaaaaaaaagaagaagatctttttttcaaatggagacgtgtctaaatagaagttcacaagtcaattggaatgtttttattcactcagggttgaaattggggattggggaatggggaagacaaacctgtcctttctttgtatgtagagaatgccagttatatgtatatcccccacgcagaagagaaagagaaggagaatgcaaatgcaaaactacaaagtcattagcttaaagaggttaagaaaagggaaaatggcctgaagaaaaaaaaaagggggtcagactgggggaatcggggaagagtttacagttgacaggcgactagttccttttagaaaaaaatataaaataatccttaaagccgaaaagaagcgagcagcgagaaacggaaataaaagggttaaaagagcgtcgagaaaaggaatgaaaggtaaggacgtgaatccaggcaaggtatgggagaaaacattaaaagggggagaataggagtgggttaaggggggcggactaacttcaggaagttctgatttatatgcagttaccctcaattggattgtattgatatcgaatagtacaatataaaaagaatcgaatcgaatataaactaataaaaacaaacttggtttccccaaccttgttcccgtggctctgcagaactggatcaggtcccaatacccctgacaggatcaatatagaatataactaaattatatacatctgcaatactcagggacatcttttaaatcctcttcttaatttctgctggacaatagcatgagtcctgtgacaccgtgacaccctttatatctatccacgactgcaatatcccgtgcgaagaacatatcggggccttgatgcctcatttagaccgcttttagatatatttgcaccccatggatatgaagctttggcgctatacaaattgattatctctattagtctaggtgggttattctaaatcctacgattggttcatttaaatctactcaattgttttcgtacatgacagagagtgcaaatcacctagaaaaatagaatgtatgaatctgtatggtgccaaaagcctcattttgcctcatgctgacagattactaagctgtcatttttctgccgggccgaattcaggcatcaaggcctctatccctagcttatagatgccgaagaaactccgggccaatctatactattcacatatttagcccagcaaaggtgcattttcctattctgaagcgaaacagccatctagaccttttatgttgagtttgatcggcactcaataaaccctcgtagagttggccttacaattagtctctgaatatcaaccaattacgttggagagtacatagctttttcttagaacccctaactatcgttgcaactcttgtagccttgtattctccagtggtgtagtctcttttcctgtcaattcttggacctgttaaggagacgttcctcacgttgagctaatatcaggcaaagagttcccatattctgtgcgttgctgatatcttgatgatctgaaattgaagtagatagttacttaaagcaatgtcgtcattatacttcatgactcacggcattatcctcaataatcagattgaacatctaacatctaatacctatacttcataccaatagttagttgtacacccgaaagacagagatatagatcgccgcctcaggcatcagtggggatcccgcatctatcggaaatttacccctccgcaatgtgcgattcctcccttggacaacttgcaattgggaagagataagagttccattctttgcgttatcaggtgcgtttgctttcacattctaatccgtcctgcatctcgggattctttcagcccggggtatgactcacagattagacctatattaattatctctcccacagaactctcccgcaactgcaaagaccagacccaacgccatggcgtcaaccagcatctacatcgacgaagacgtcggtaaagacgagtcctccgccaccggcaccgagaccgccccctacaagaccctcgtccacgcctacgtggaacacccccccaccaccgaaggcatccagtacctcacgcgcaagtccctgaccgacgccgccggtgaggatgtcgaccccgcagccaaattggagtggaagcccgctaccaagtcggccatgaagaaggccaacaacctctgggagcagcgcaagaagaaggccgccaaggaacacgaattggccatccgcgagaaggccgaggccgacaagcgccagaaggtccttgaggacgccaagaaggtcgtgatcaaggaggacacctcgctgcccaagcccgtacgcattcgtctggacgtcaccgacccggccatcgtcaagctgcgcaccgccgagtccgatgagcccggcacccgagtccgcgttctgggccgagttcaccgtgcccgcgcccagaaggatgtcgttttcatcactctcaccgacggctatggatacctgcagtgcgtcctgaccggtgacctggtcaagacctacgacatcatgaccctcaccctcgaaacctccatgtccatccacggtgagatgcgcgccgtgccccccaagcagcatgcgcccaacgaccgcgagctgcacgccgacttcttcgagatcatcggcaaggccgctggcgacaaggaggccattaccacgcgtgtggcgccggacgctgacccgcagactctctacgacaaccgccacttggtgctgcgcggtgagacctcttcctccgtgatgaaggtgcgcgccgctaccctgcgtgccttccgcaaggctttcgaggagaaccgcatgctggaagtgacccctcccgccatggtgcagacccaggtcgagggcggcagcactttgttcggattcgactactacggcgagaacgcctacctgacccaatcctcgcagctgtacctggagacctgtctcccctccctgggagatgtatactgtgtgtgcccgtctttccgtgccgagaagtcgttgacccgccgccacctgtcggagtacacgcacatcgaagccgagttggacttcatcaccttcactgatctgcttgaccacctcgaggatgtgatctgccgcgtgattgattacacccttgctgagcccgagatcgccgggtatatcaagcagctcaacccggacttcaaggtcccgtcccgtccgttccgccgcatgaagtacgacgatgctatccagtggctgatcgagcacgaaatccccaacgaggagggccagccccacaagttcggtgacgatattgctgaggctgcggagcgtcgcatgaccgatatcatcaaccagcccatcttcctgacccacttccccgccgatatcaaggctttctacatgaagaaggatcccgaggaccgccgtgtcaccgagagtgtcgacgtgctcatgcccggtgtcggcgagattgtcggaggcagtatgagaatggacaactgggatgagctgatggccgcctacaagcacgagggcatggacccctccccttactactggtacactgaccagcgcaagtaagtgatgtgtcacatttttcctatttatctcaatgctaacattacaataggtatggtacctcccctcacggtggctacggactcggtctcgagcgtttcttggcctggctgtgcgctcgttataccgtccgtgactgctcactgtatccccggtacaccggccgttgcactccttagatatgtcaaaaaagttataaagcatgatcatgataggtacaggaatgtggcatgggtgctacaatggacgaataagattttccttcaaatgaattaaaacgattcagtgtcttatgttaagtacccaggtacaaagtacctatgtagattttgcttgtcccttgaagaacacggatacgaacctaggcctgccatatcccgcaagactcttcaaactgatgcccactgacactccacaccacagcttcgaacaacaccaagtcccggaccttggatactctctgaacacatgtacagtcaagtccacccagcagtcttcgacattaggatcccgcagaatatagtccacacccagggatccaaatccattcccaaaatgttgccgttgccgttaccatccagcccaagaccctggcacctggaattcaaaacccgaccaagacgggaggggagcatgcatgcgcacatagcctcaaaccgagtcccgtctgcatagaagtttagctagattccaaacacggctgttcacgtgcggcgtctctccatcgcccctggccggtagatttgatttcatgttggtgttggttttagtgttggtattggttggatttagctcccagccacaacaactaaagccatagatggaaccgatcgtccggtctgatgatgtgcgagtcagggttgcgatcagtagggaacgggtatgttacggcattgccgtgatcgaggatggggatatggatgttgtcattttcgtatagaaaaagattggaatcgagatcgcgttggatgaagtctggtcacgggcacgggggatcgattcggtgtggtgtcgtcctgctgttgtcgtttcgggtggcgggaaacctctgtctgtcaccttctttcatcatctcccacaacgggcatgggttagttacgggctttttttttcagaaaaatgggcagagatctgagattcgtgtgaaggagtaagagggagtgagagagaaagtgagatggtctcagtctctctccgtctacaggaaccagagacggacagtgcgatgatgaatctgaagtcgatctctgaccagcctcttttcaaaaaaaaaaaaaagaccagcaaactctgagctacatctctagcataggaaagagaagaggagctgtcccgcctacaggaaaagaagcgcccagcaacaaagggcgtgatccactacatcctgtgcttccattgctcgaaaccgcacggagatagaatccgtaatgcccacggggcattcccattccacttgacccccttcgagaaacggcccaagcagcccagtggatattccatttaggtatgtccttgtgagcagaggaatagaactgtgtttgtcggtatttcggaccgaatagacgccaacatcgacggtcaccccgttttcactcttttcaacacaactcatcaccacccaagagacggacgctgcttaacctcgagttccccggacagggacatatcctcgtcgcgtttaagtcttgatgtttgccttgtccccgttgtacctttgtttcattccgggtgatgtttccccgtgtacggagtggcggtgggcctgtattgggtttccgcacaccttgggttagtggctggctgtcagtctcataccgggcttggtattgatagcctgatcgtcggaggtatatagatgttgtccgtgtcgacgagatcacagctgttgtgatcagcagggaactgggtacaagtacgtacttttcttttcccttttcttgctcttggagtcagagaacacgtcgtcgttcctcgtttttccttttcccttccaataaccctaattcatgcataccccggacaatacttgtgacaaaacacaacacagacattcagctctgtatgaaaagccaccccatagaggaacatggatgtgaaaaaaaaaaaaaaaaaaaaaaaaaaaagcgtcatgagttatattgactaccactcgacttacagcatttcatttgtcttatgtcttttccaagacctaggcaaaaagaggaagaagaaggacactctcatgaatcatgattgttctcctagaagacatcaacagtaatgcacgattatgtcacccaattctcgagccgctccaagaaaccaaaaaaagacaaacaatcgccaaagccacaaaccacagcacatgttcgttctcattggtcgagtaaagtgcggcggtcaaatctcatcttggacgcgttgaagggcgaggcggatgtcctccttcgacgccccggagcgaataagcgagacaagccgagcgacagcatcgctatgagcgtcgcgcacgacagcgaccaagtcttccaggaactttcggtagtagttcagctcgatttcctgctgggagatctgctggcagcgccgaggtgagtcgatggcatgttcgctgttcaggctggtggggaggtcacgagatctcagcttttggatcaatttaagcgttgccggaagggggtttggttaacggggcggaagaagaaggaggagatgcgttcagagaagacagtgagagagagagagaggtaagagataatagaggaatggtttctttcttgcaatttgggccggacgagaaacgatgactactcactttgctgcgttctcgctgcgtgccgactcggtctggcgggctccgttgcgagctcctgggcctccttggtcgttggtagagacggctgcggtgcggtttgacatgttgatgttggactgggggccgggtatgtactgtcagggggtgatgttcctatgtgcgaagagaggtttgggaatggtctctaccgtgctcgaagctgatcaaataagggttcctggtgtccctgtgtctacctatagaatagcacaacttcttagtagttagcaaccagactactggcattttgggggagcgaaaacagatcctaatgggagaatggggcaaatggtctaagaggcgaagtatgaacatcaaggtaagaggggctgggggcacaaatcggtcggccatacgtgtttatagacaagtatcaccgcgtgggaagaagataaccttttacatagaatttgtagaaaggttgggagatgagattcgacgagtctcgagaggtcaaagggagaaaggtgggacctctaacagaaggtatttgaggggattgggcagatcgctggtggcatccaacgaatcgagaaatatagggcctggtatacttccgtgaggctctcgaggtagcctcgtgttaacattcgggatcgaatttgacaatatagcaatttcagaataatagaagaatcaaaagaattgcattgtagcagttcgattgtcaagaccttcaatcggccccggataaaactgccagccaatcgtcaagcgtgtttttctccagagagcacatcccaagtatcaatatttgggccagcctaagtccatcttccgctattattttccaccaggctcttcggcttcgaccttggttcctggtgtgtggtttgccgggaaaatgaggcgaatttagggccctagattaatattcgcctgtgtattcggatttgccgaaatctccctcgggacggatagattcttgattccaaagaggcgaatgtattcatttttgtatccgtggcgactttcgcgcttttgtccatggcagtttgtttatggagagtggtggagtgacaggcatctgtactcctgttccactgtttcagtagtgacaggagccaattgggacggctaggactcccgggtggactcgaactaacggcaagtaaactgacagcaagtgtccttggtaaagttgatgatcgccatctcatgctcgttcaaactcgtgggcctttcattctacctcgaggatagagctgtgaatactgatggacaatctgagaaacgtgtttcgtcaagttggaccagaatgatgttctgacatccctgggacccggcttctgtgtcctttcacagacacacattgaagaggtacagttctctctgtcttgtctggatgggattcaccggcagattcgtagaactgcatgctgacttgccctttctttcgtttaggaccgacccttttagcacccaatccgtttctcaacgtcaagacaagcttcgaactccctgttccgtctcctccttgtccgttgacaatcgaaccctccatatgaacatgccgtgtgttcgaccgcacctgataaagttgagcacggtcttttctcgccagacatattccacgattctgaaaatttctctcgataccacgaccccgaacgcttgaaacttggcaacatgccttaaatggcatgtgagcctgtataggcatcggttgctggctgtttacggcagaacaatggtttaatgacctgctgtacggttgtgggggttatggacgtggttgaatgggaggaccgttcaccaacactccacgatattattcagtgtggaaacatctgggtattggatcgagtaccacaactcgggggtgtgacacggaaccagcatttgatgaagagtctggtgttgggtatgatagaccaaccagcccctggctcccatgtgcttctgtgggagtgtgtagcattataccaacattttctgttattgaccacacgaacagtcatcgatgccgcagaatagcgtgtcttgaaaccgaccatctcaactgtttccgccatcacctccagggtattcgcgggatatttccggtccatatggttgatagaggctttcatgcaacggcaacggggatatgaacgaaagtaagtgattggtagtgcagtacggagcagtggcaccgtcactgctccgttctgggggttgtcgtgggtcgtttttgcacatcaaggatgcagtgtatgtggttccatgtcgattcgggtcaaggaacatgatatgatgccttttgatcttgcaagctatgacaattccgtgtctgaaggccactttcgggtcgggtgtcaacttgaacccaggctctcagcatagacactcatggtcgcggagtacagagcgcagtgatcatctgagccaggcatggtaaaggggtatcgatcggtgattcgaggccgtttcatccaggccatgtcgaaggttgctttggtgctgtcgggctttcgacgggtcgtgatgggcatcgacgttggctttgtgtgtgacgaaaacggggggtcgtgtttcccaggcacactgagactaggcaacgctcatccgctgcagtcctggagcatccgatctgtccgagtcagtcactacacagcacggtcggtaacgttggaagctggcccatttggccagctcgatgcatggtcgaggcagtctcttcctgtgatcgtgtccccgttaatatgaggctttctgtcggtgacggtatggtgatgtatatggcagagtagacatgatatgtgagtgagaagcaggtgtgacacttcggagccgagttgggctcgatccttcgacctaaccctgaaagtagacccctgtcaccagtgatgccggaacatcttctagggacaaccccgtctcgagggtagaacctgagactccctacttgtcttttctcctggcaggacacacgcagtatcaaaaggagagtccgaggtctgcagtttcctttcccaaggggaggaaagaccaactctatccttcacttgtccaattggatccacccatgatgaggaaaatagttccaggcgaggttattggggggctccaccggcgccaacattgaaacaagcgtcagacttgcgttttataatgtacagtgatctagtgaagtcgaggaactcggaattcggaccctgctccaccaatatgcgaatatgttagcatttgttgaaagttctcgtggatgttaagcctcaagagaatgtcctatgatctgtgatcgggcaaatcttggttggcccacatctcactattgaccaccaatgcagtggctggaacctcaacagtagaataacgagcaatgttcttgatattgcccttggtataggaaccgttgctgtgaagttccaaagggtcgcagtcaatccttgataggatgcatgtggcaaatgttcttagttcagccacccgtgacaagtagaaacctgctaagtagagttggtaacttgtttctttgcaggtacagggattcttattcataaggtcatccacggctcgaccaaggggaggttcattttccagggccgattagcagatatccatttacaaaaaatcgaggaaaccattctaactcgcatcttaaggtacatcgatgttgaacgagtcagtggctcataatagcaggatacttggaagccttacgtaaatcctgacgtgaatatgacacaggcagatgacctggagattcgacattgattttaccttccaagctttgttatgccatggacgtctataaccttgatcaaggcacaccgaaacgatatcctctttatcaatctacttctacgaattcggtataataagccaagctcatacctctcgggtcagacgggtaccagtcgactatagctatataaacccaatgaattcgaaaatcccatctcgtgtcatacggagttatgtacatgccaatgtatacaaataccacattccacagcccccgaaaatgcccctaacacgacacctaaccacaaccctccattcctaatgtacgcgttaaatactaataaccagcctgatccctcgttgatgataagcctccgacaaaacatctcgacaacgacaaccgacaactaacgacaacagccgacgaccaaccgacgaccagcatctatacaaatcaaaacagacaagaagaaaacaaacagcaaagaaaaccaattcaatccaaacatgcatcttcccatcctcctcctcctcagcgcctctctcgcttcagcgcaattcggcaaccaattcatcccaagcccagcgggattgaaataccccaaacccatcaacagacacccacactacgtccagaacacaaacaaagaaatcgacaactacgacaactacgactacgacgactacgactatgataacatcccaagcctccccaccccaaccccaaccccatccccatccccaacccctcgaatccacagcacattcctagtgcgaccttcgcaaacacccactgtccaagccccagcccacggatatggacatgtctacaaccacccaagccagggtccagacgccgagtcccgagacaatgcaccctccttccgcggtgccgacgacaacgacgactacaacgtctcgcccggcacatcgggcggcgtggctccaattgacccgctagcacctggttcccaggtcgcgcctgctccgctcttcgtcaccgcgaatcatgggaaggatgaggggaatgcgttctgttctgggcggtgctttgaggatgaggaggatgcgcagtgtgcgaagccttatgtgagttttttcttttttttttaactcttttctttctgggtatacgatggagatggatatatattgtgtgtgtatttgggtattggtttactaatgtttgttctaggctttggctatctataagccggctaaggggtgctatatgtgttgtattacttccgatttctaggattggattggatattggattcattttgtgagatggggttgtttggtgtttttataggagacggatgggatgggtgttggctgtttcgattgttgagtgttcttggtctatatctgtatcttccgccttgcttaaaatagtttatttcttttttatgtcttgttttagattgaagtaagagtagccgagacaaaagtatcagtatcgtcggtggagagacttgccctaatttcggcagacccatcagcctgaaacaaatctgtacattacacatctatacgatacaacagatcagcactagatcgttggtaggtccacaaataaataagcttgattaaagaaccagactaacattgcttaacttacgaatttacgaatcggtagagatgaatgaagatatgccaaacggtccatttggtctagataccagagatatccgcattaataaatctatattcgtgtagggagtatggaataaataaagagcaaatccatgatatcatatcgttttccacgctgaagagtcacagctcgctcggactcggaatttgaataaaaggataaagaggataggcatggggaaaataaaccgaaagagaacaaaagaaaaaggagcaatgagctccatttcatgaccgcaaacagtgtatgtatttttgttcaattcttcacgcaagtctcgacgggccggccgccaataccccgcgccatgcagataggagcagagcgtttctcatacgagatatctccccacacagcactgctggcagggaggatagagccactgtccgagaggattggaccgacgtcctcgtgcgcagagacgatgtgcgggacaaccagctcgacgcccttggtcacgctcgtaccggaaaagtacgggttgtggcgcgggggcagcgggcgggcctcgtacatgctgcccatgtagtcagaggcagtgctgctgtaggacgacgccacggtagacggggtgtttgtcaggctgggcacgtgactgtggctgtgggccagagcgggaaggctggagctgctgcgttggacggagggccgaagcatgggctcgttgccgccgtggaactgggagagatagttccaggcctcggaggatgccagggacgaggcgctccgctctaatacgggcttccattcggtggggtcaagatctgacttggcatcatgcacgtggctgtgtatccgcatggctgggattcggttgcttggcaccctggtaggggtcattggggccacgatagtgcgtggagagagggaaggagatgtaggtggtgtagtggtggaagacattgatgacatggatgggactgatgctgagagtggtttgcaagagtctttgcggcggcaactatgaaataaataagtattcgagtgccaagatatgatgcaggtcccaaacaaacaaaggggaaggcataggatggctctaaatataggccgagggttaccacatacctttcgctacaatataacaaactgttgttgggggtagtaatttggttttcacacatggcgctggaattgggtcagcttttatgtgcacgaaagaccggtgtaaggaacacagatgacggcaacaggcatgtgaggaaataatcccggcaggattcaaagataagagcttaggggtcacataccaaaagttcaagaagctagccatatcgaattcagtgtcgtccgcagacgtggacttgctcgctcccttttgtcctgagcccaatttggaaaatgtgacggtggcacctgaggtccctcgtcgatgtaaagcaggacgagtagacttggacttggaaacatgaggagaggaaggggagcggcggtggaagggggctgattgagtcatagcggtgtaggctcaaatgcctcactatcttatcgaaaagactctattgccgagactggagcaagtgtggagcacaagggcccctggggggagcacagactgagggatttgtgtgcgaagtcttgaatccaactggaatgtgccgagacgggtgcaattgggaatacaaatggggatttgggaaaatggagaaacaccggagtatgtatattgagaaacgtggggttgacgagaatcccaggctgataaggtcgtgttagccatctgacacacttgcgatgcaaccgccgactatctttagccagtgagtgggggggggagataaggccgagataagaaacataccaaataccaaggatgtctataacggaggtctattgttgtatagttgcaataccagagagaaaggggaatgggtgacacaggaatcgaaaagaggaaacgaaagaatataaataccaagtggaggaacatctgaagagaaaacagacgaagcggaaaaacgtgctgttctggtaggatgagacgatcacgtctagactcttgggacgagaaacccttggggtgatgtatcgggtaagtcacttccgacagcctccgccggtatctgcgcgctaaacagtacttgcatggtacttctcgggtactccccgggtccttgcccgtgcttgcccccctcccgacacgcaatcaatctagaccagctgagtcactggtgacgagccctgccctgacgccagctataattagttagctggccctgatcttattcttaatggaagggtcttgctctgtttctctggatctaagtgtcgtcgttctgaaccacctattcgcttcgttaggtacggacagattgtcagttcgacctcgcgatgtcgacttccaagtatatgcaatgcagtggcgcagggaccatatctccggagggggtcggatctggcgtgatcggtagattgacaccattcttcacaatcggtatattagtattgtatctactccgtacaagttgatacttgcatactggcatgcattgtataccatggcgtataccgtggaagagccacattctaaatgacgccataaatgcctcgacgagttcaaggttcatataaacagacccagatggcgtgaacaggtgggtgtgaaatacatcatcattcacatagtcaactacaatatacagcttgttataggtttcttacaaaatacttcagataatactccgtacagaataacggccggctacggcgacaacgaaaagagatcgacggatcgaaatcgaaaatcactatgggggtagtatgtatgaaagtgccacacacactaacacatctgcctatgacatgcgtcgctagccctcgtcagagaggggggtagtggtgggactaccattctaggccacactcacctgagcaagtcgtagtgctaatcgtcgatcttccgtcttgcgtgtttcgggtctatggggaaaaccggggctttctttcgagaaaaatgccccgatgactgccccatttagctttttgtttgtgatcgtttttcctcttttcccgtttgctttccgccgggtaccgatttcgttccttggataggcgatatcgggatataaatatcacagggcaagctgggattgatttttatcggtggggccggtgacatctgtcaacaatgaatacatcataactgcaaagcctgcttgagtcttagacaaagccgatttatgcgacgtggagaagaggtgatgctgacgtccactttgggttcggcgctggattctatctgggtatctaactaaatatcgtacaaataatcgctcatgctttgtcaatctccatcggctcagttggaggggctgctcgggatgccgctggcgtgggtgtcgaaggagcctcggtgagtgcattccctggtgtctgggcctggccctcatcggtcagtttcactgtacctggtcccggcttgcctgtaaaccgctcgggtactccacgggctgcctcggccggcccgacaaagcatcccagcatcgaactccaaatatacccctccgatagcatacggcggatttggctatatgcatatgaattggcgtaagggagagcggtctctggatcgcggtaacgcgaaggcaatgaagtgatgacgcatagagatgacgagatttctattatgtagggttagccttattcctaaaatttcaaaatgatacatacttgtcaaacggccgagctttttggcgttgaagtacatgctgtatttgcgattgttggcggtcgcatagtcaaagttctccaagatcgtaagacagcgtcccgtctgctcaatcactggagggggttctggaatctctggtgctggttccttcaccaatccatttgataattgtgattcggacggtaatgtggatggttggtttaggctccggactatggcgttttcgggcaccgtggcttgactggtggctgcaggagccggcaaggcttgaggggccagtgagacttcagagctaacagccgtggccgattcaactggccgagacccatccaatggcggtggttctggcacagtcgtcccagctgcatgtgctataggctctgcagaagtcggttgggcagcaacgtgcggagtggccaagcttgtttggtccgttgattctagaactttttgatttttcgtagaatctgcagccgctgcagccactgttgaatcaatatccatagcatcctcggttttggtgggtacatcaggcgatttttgaatagagccattatccgcagaaatcgatgtatgatgagacgctggaatttccacagcaaacctcaatctcccataattcttggactccgaggattgcccttcagctgtgatggattgatcttgctcaggaggtactgatgtatttgcgtcaacacttggagctttttccatagcattgtccttgccctgctcggtggaagtttccatgattgtcttcgtctctgggattccatctggttggccagcattcgccccggacactaagggggtgtttgtgttctctgcagtgtctgtattctctgcggtcggggcagcattctcgggtggcttgtttccagtcggttggtccacggtgaacgtcgaaggaggtagagattctggtggcccaacaactacatggaagtatggtggttgtgatgtgcctgtggttgaccccagtgccttcaactctgccgcagccttctctttatcttccttctctttctttttcttcctcagttcatctttatctaccttcggtctgatgtcgattttgcccacccgggtgagacgcccgttcgtccatgtagccacaccactccagtaggaaatcaccggaccgtcaagacgacgattttgtagtgcttcaatcctcgctcgtctttcgtccgcttttcgtttttccgaaagctcccagcggttgagacttttgctattgagccgctctactcttgctgcctccgcaagatggtcttcctgggtcatctgcttcggtttcaaatgggccttccgcttctctgcctccttcattgtagcgatgatgcggactcgtttttcctggctgtccttcagacgagcatgcgtaagctccttgttgaccatggtctgtcgacgtgatgattgccgagtaggcccatcctccacagtgggaatccacgagatgcgctccgactttttcttcggacgaggggcggcggacatggtggacggagcggtcggatcaatcttgactcgtttgcgcaaggtctggaatcggagatcattctgggctctgcgcttcttgcgttcgtctttttgtagtttctgttcgccctcgtagtcgttctgcgcgttcggcccttggtcttcatcctcgtccgacgattcaagcaactcgtcctctgcatcagggtcggccacatccgcaaactcattatcgtcttcgacttcctcaaatagaagcgacaagtcatcatcggcagcggcttcaaggagggccgacatgtgcagtcctgcggtgcttcgtttcgcgcgtcctctgaccaatgactccacgggcatctcctctccctccgaagactggaccgcagacgatgggtcttcttccattatgtcggccatggtgttactggtggcaggtgccttagaacggacgattaagcatcagacgcgagaggggacgcgcgcgcgacagactatgctttgcgtgtcaatgatcagcataaattagaaaaaaatcaaagcatatagaatttggattctgccacacaattaaatgagctgttggagtgatgggaagataccgctgcgggctggcaaggagagtggcgcgaaagaaaagtcgatgcctcaggcgtgtagaaatcatccgaccaatggtctttactaacgtgtttacatgactttgaagcaacgacacaagatttctctgattgttatttggtcctacctccattgcacagtgactgatactactcaacttttatctagaagtgatgatctaccttttatgtactacgatgagccaccctgttcaaccgtaccgaatgcttctgaaagcttggcaaacaccttgaagatccggagagcattcttcaaggctcgacagatagccaaagcctagtctatttacgtctccaacacagccaccacgacccatgaccaaccccagagggccccagctgacgcctctggcaaggaagaaggacggggacacgtacctgatccatatcccttgcaaccaaaacacagcctttggtttcaaaccccagtcagttctccttacatgactagttgcatctcatcccccagggatatcttcgtattcgccatgaagtctcatatgtatcctgtcacggattcaagcgtcgagacatgacgcaccggaaggcggggcctttttcgtttccactcctgtctgccttttcttgcttatgccatgagcccttttcttccgaaagaaaaccttgaattggacatttggagggcatggggttgtaagggccttgtatctgtactaaacgtatacctttttagatttgttgatatctcaccatgttcagccagaatggagtcttctaaattaatgtcatgggccgtgccattgccagacgcttggaggaattgccgattccttatatttttgttcccgtttggttatttcgacgttgaatgtacagacgtgcaggaagtaagtactttatagatgcctgtctagtactaatgcaccttggatgtaccaatactagatagaaaatcaaaccgcctagagtgtcatagactaaatcaatccaattccattccattcaatcagatttcgtattttcaaccaaattcatccgaatcaacaatcgaattgtgggtgaagctgaaggagggccctccaccaaccacagccatcttcctcgggcatccggccagctccccaacatctcttctccttcctttcctctccccttctcatcctccctttgacttcttcctcacttctctttttttcttcttttgctttctgcattcttagggtgaattcgactttcggttagtgttgatgacactttcggagcgcaacactaactcactttccagccacctcgatccctttggacccggatcatcctttccatctttatttctcacttgacgcactttgtgccagaccatctttgtgaacttcgccgtgtttttgagcctttgacgacagaaaaggacttttctcttttttcttagctcgactcgattgctttgggacacccgcagattgtcatacaacccgaacaaacggtgagattatcatcaaagaccctcgacactgcaccgtggtgcttggatttggaaagcatcagtctcggtacgcaaacatcccaacgattcatctcggctttttggaattgcttttcgacccctcccactttgcgaccccccaatagcaacacacatttcgaacaccatctaatttcgactgtttccagtgtgccctcgatccttcaatctatccttatcccatgactcctatcccacactattgaacgaagctacatttaagttccgaccttgctatattttggcattcgcgcggaggtcatatttggaagggattcgggccctgccttgctgaaggtataaagtgataatccataatttgccggtttcgcggcctgacggtcagatgaatttcaattacatcccaaccacccaacccatgtcgggtacctcgacggggcgcagctctcctagcgatgtggccgggtctgggaactcaagaatgtccttcgggccttcttcggggtccattggaagtttgaggcccggggctggctccccttctcatgatttggcatcacgtctgtactcgaagcggtaggtttgcttctttacttcctgtgggatataacagacaccgcgacaattggctgatactttgactgttcaagcagagcccgtgaaattcaagctcaagaaggcctttctcctagtatttggggaccccctaccagcggccattcaaccccgcttcgcgagaatattcccgaatcgccgagtcaagatagttttccagatttgattcctaccagcaatggcgccatggacagccctggtcgccgagctcgcgctggaacggttccatctcgttttcctccgatgggcacactgaatgagatggattttcagcagtcttatatgccacagacttcacgaccaacaccctcaactagtccgtttagacctcccggtgtttccgggatagatacgagttctatcgcgagttcgactggtgtggccaatccggcatcgctatctcgccttcgagctggctcgatgccgcaaaaaagcaacttcttgggaggtggcggtcccttcggtccatcactgttttcaaccaactggtcgacgggtcgggagagagctacaactttaactagtattcgatcttcggaagggccgacttcgcctagccactcatctttctcgagggatggactcgcggacaccgatgtgaagactttggattatctgggactcgctgagaccccgcaacacggaatggcctcctatggacgtccgtctatggaagctttgatgcaacagcagcagcagcaagcttctgcgctgccgccactcttggctgagttggcgatgatgaagagcaataatcgattccgatcatactctgtcaatgccaaggagaagtacgccgatgacgaggatcttgaatacgagaaccgctactcccaacttccctcgggtactatgacgccgaccgccgccgcgaccgccgcgcaacttgccgccacacaggcccagatccaccagcataatctcgcggtccaagcttttgccagccatgcctctgtcagccgaccccgggcgcgaactgctggcattttggaggcacctccccagcgatcatccatccgcaattaccttgctacaccttcccgcctcgacagcagtttcagtgctgctgatctgcagattcccgagaatggtgaatacgacgaattatccgaggcagttcagctgatgcatctcagcggtaacggtattcccgctatgggtggccgaccggccggcgagatggcagatgagaacaaccaggatgggcctacgcgggcactttggattggtagcattcccgtgtccaccactgtcacgtctctggaggccatctttggtatgtatggaaagatcgagtctacccgtgttctcactcacaagaactgcgggtttgtcaacttcgatcgccttgacagcgccgtgcaagccaaatcgctgctcaatggaaaggaaattttcccaggcgcaggccccgtcagaattggttacgccaaggtccctggtgcatcggccaccggtactcctggtgcaaacggcacccagtcatctcccactcctgacccgaacttcagatcaaatgttgcagcgacagatgggccggatcgcgcggatactaatgttatccctcagattcccgctctggctgatctgttgcctgagatggtgcaaattgtgcaagaattcggcgccagtgatgatgacctgaagaacatcacggcaagcatccagacttccatcgcgttcaaggctttcaaggatgaaatcccctcggtccaggaaacgagtcagtcccggatgttcgacgcccctcgtctccgtgacatccggaagcgcattgacaatggtgcatgctcgatccaagaaattgaggagactgccgaggccatgcttcctgaggttgcagagttagcgtccgattatttgggcaacaccgtggttcagaaactgtttgagttctgctctgaatctaccaaggagcagatgctgtctcacattgcaccacatctctccgaaattggtgttcacaagaatggaacctgggctgcgcagaagatcatcgatgtcgcgaagactcctggacagatgcagttaattgttgatgctctccgcccttatactgttcctcttttcttggatcagtatggaaactatgtcttgcaatgctgcctgcgatttgccagtcccttcaatagctttattttcgagtccatgctcagccgaatgtgggaaatcgcccagggacgtttcggcgcccgagcgatgcgggcttgtctcgaaagccaccatgccaccaaggatcagcagcggatgcttgcatctgctatcgctctccacagtgtgcagttggctactaatgccaatggagctcttttgctcacttggttccttgacacgtgcacattccctcgccgccgaacagtattggccccgagacttgtgcctcaccttgttcacctctgcacccacaaggttgcctacctgacggttctcaaggtgatcaaccagcgcaacgagccggatgctcgagacattgttctgaaggcactcttcttcagtcccggcgatgaagttttggagaagattctgagcgaccagacatctggtgcgactctgatcttcaaggtcttgaccaccccattctttgacgagtctatgcggactgaagtcgtgaaaaacgtttccaaggtcctcacaaagctcaaggcttccccaagccaaggctataagcgtctgatggatgaagtgggcctgtcctcacgaggtagcggtcgggagcatcaccatggacgtgagcactccaccccggagaaatcgcaacaccgtcaatcctctcgtcatggaagcacaggttatccagcccagccatccattgaccgacaacagtacaatgggcagtttactcccaacacgtttggccagaacccggacaaccgccctatctccgccgatcaatccaaccccccgccccttgatccatattccaacgggctcggaaaccacatgaacggtcttgccagtataggtggatacagccaggaacccctgagccagcaacagctgcaataccaagccttcctcgccgcacaggctcgcggtgttcccacgggctatcctgccatgccgggcgccaactacggctacccagctggttcgaccatcgataacctgcgatctctacagtcgcaacaggcttctcccctccccggaccgggccagatgagtccgatgctccagaacaactaccaacagttcagccctgttgtcaatcctgcccagatgtatcaataccctccgcaatactacccccaggcacagcctgtgcagggacagtcgggcggaggccgacgtggacgggtgagttcattctcggatcggccctaaaccgtataatccgccgatactaacgtgcatgcttgcgtccagcgttgatcccatcttcgtatgatttctaatcgatctaccttaccatctacatgtataaattttcttgatcatcttttcttctttttttctcatttttgaagtttctcatggagaccaagcgggtttatccagctacgtgttgtgatttcaccgtcctatctcttcaccctgatcggacgctggatcgccggcaggggagaacggacccgggagacgaactggatacgcatggggaatcggtggtgaaaaagtcttgtgtctcttctgggtggaggcccagttttgtatcttcggcgtttttgaatgaccttgtatcttttgatcttacgataggacttctcttctgcctgttgtcttagatcgagatttggctgcctagtggagcatagtgaattgatgcagatgtaaaaaacactatctcgtagtgaatgtaaataaatcggattgaatgagtcaactttgtcaacatcctttgaattcatgaggctgagctccacaactacccggtgcactgcaatccacagcttattttcaccatcgccaaccaaccatggcaagagaatgaccagtatgagcaatactatacaagaggagactgcaattctcttccaggataaaaatatatacctcatcgatatcccgcattcaatcgcgctcgcacaagaggggaggccaacatcacaacaaccaacctcagaatcattaagaacagaaaagagcacgcataagaatatactgaatctactttcatgctcacctatcaaagagccattcccctctaccgagcccaaaaagccagctgcgctcgctaatctcctcaacaccattcccatctctgagagacggttccactcggaactgatactgccactcgtgagggattccctcgaaactatcaaggctgggtgttcccatgatcgccggtggtgtgaggcacgagctgtgcctagtgaatctccaaattatgatagcagaatgccgaatcagaagcggcggtggggaaatgattatatatgcttagagtctgcggatgacggtgtttcgactcaaaatgagccaccaataattctgtcgactacctcaccgaacgacttcgaggctttatcagatcttgctattgtcaagaatccatcaccagagcccgcaatcatcagggttggaagctgccatcgcgacgaagcggattcccctccgtgcgaatatatggcaccacctaaatcgagctttgtgctttgtacactacctctattccaaactgagatctaccgcccatctacatccaataactatcccatccccgggctcccgcaccaccaaaagttcaatctcatcctcatggacccgccgtggccaaacaaatccgtgcgacgcagcggacactaccaaacacatcactattccgagatggatgtgcttaccaaaggattacgagatattctccgtgtgcactcgcacgaccccagcacaaagcaggggctacgccaagaaacccataccgaaccgatccaaagcgaacagtctatagctgctatatggatcacgaatgcggaaaaggcccggcgagcagcatacgaggccctgaccggcgcgggcttttgcatctgcgaggaatggatctgggtcaagactacgtgggacggacagccgatctcagcactggacgggctctggcgaaaaccgtatgagattcttgtcattggccgcaagggtgaccatagtatcaatgtcaatgtcaacgctaacgccaacaatgctacatctctgtctcaaatggatgacctgacgcggatgagtgcgaccattaccacgagacgagtcatcgctgcggttccggacttgcattctcgtaaaccgaacctgaagtcgatttttgagaatgtgtttttcacggatgctggtcggtgccaggagtattctgccctcgaggtgtttgcgcgcaacttgacggctggttggtgggctgctggtaatgaggtcctccggtttaatgctcgtgagtgctgggtcgagcttggaggtagagaatacagtcatgcatgaatgtgcatatgcaaatcaggttttcaggtcagccaggttcatttcgtagatttacgacttccagacttccaatgctgtcaacaagtgggtacaattgactcaacgcttattggagggtcattaaacttggctcaggttgtatatgtgtgatgcatacatgtacatagaggcggtctgatcctagggctaccatcgtggacatgcttattctcacgggaactgatttcctcccgatcagcgcggcaggagttccgcgctgacaaagtacaatataaaaaaaacccctgtagaattacacaccaagggactcaattacaataataaaatagtaccaggacttctctcacactacatatcttcccagaaacgcgggaaacacactctctcgcttagactgacctgtgtgacccccaaacctgccgaccaaattcagcttcatcgaattgacagaatttaccagacacaaatcttctgtctatgatttcttagaaatggctaaggatcaagaaaatggttcaggggtcaagaagagctcggatcgtccaaaatgcttcaccagcacatttcaagaggttctcttcgtcctaactgccacaatggccattggccagcagtccttcttccagggctgtatcgtgggcgtgacagcatctattggcaaggatttgcacatgaattccgctgaaatcacttggatcaacgccggtgcctcgtacgttttccccacatttttctacgggatttccccgggtttctgaatccgatctctttccgaccccatatacggagtccatacatcacaaaacaaaacatgcaaacacataactaaccatgcactcaaataccacagcctcaccagcggcgccttcctactcaccttcgggaagctagccgacatgttcggacgcaagatgctcttcaccatcggcatgggcggtttcaccatctcgctactcatcgcgggattcgctacaaatgccatctacatggatgtcttctcggggattttaggtctattcgcagctgctgtcgttccacccgcggtcggtgccttaggcgctacttacgagaagccctcgaagcggaagaaccttgcctttgcctgcttcagcgcgggcaacccgctcgggtttgttggcggcatgatcatctccggtgttgcggcgcatttggctaactggcgcgcttcgttctgggcactcgcggttgtttatgctatctttaccgttttgactgtatggacggtgccggctgatgggtttgcgaggacgcctttgagtgtcaaggctttgaagcagtttgatattctcgggatggcgttggttgttgttgggtttgcgttcttttcgagttcgctttcgtatgtttttcccccgtggattggataccttcttgaacttcccgctgactgttatagtctggctgcagatgcacccgatggctggaaaactggatacgtccttgctctgtttattgtgggctttttccttctcctggcgttcctgtattggcagtccgttgctccacaccctctgatgcctctttgggtctggcgagatcgtaatttctctcttgtatgtgttcgactttctcatgtgcagatcgaaactaactgttcagctcattggaacttgctgtcttggcttcatgggcttctctgccaccagcttctacctcgctctatatcttcaaaacgtgaaacatctttctgccctagagatcaccgtccagctactcccaatggttgtcagcggcgtgctggtcaatgttgtctgcggtctgcttctgcatcgcgtaagcaacaaagtacttaccggcatcggagcgctggcgtatacagcttcgttccttatcctgagtttcatgaaacaagatgctacctactgggcgtttatattcccagggctagtgcttgtcgttgttggtgctgacattcagttcaacgtcacaaatgtacgttcagccccgcatgtcctttctacttcttgattccttgtctttcagcagtatgttccgtctttgaggtattgacttcattcagatgtatgtgatgtccacccttccaccatccgagcaatccatcgccggcggcatcttcaacaccgtcaacaagttgtgtagcaacctgggtcttggcattgctacctccgtgcagagctcagtcgcccttcgcatgactgcctcctcgcctgctattcggccttatctctcggtttattggtttgcggctgcggcttcgggggtgtctttggttttggttccgttcttgacaattggtaaacagggcaatgatgtttcgcaaaatgaccagttgatcctcgaggaggccggtgagaagacagatgtcactgctaagactatttctgtgatttcttctgctgttgatatcgcggagcatgagaagaggtaggtaactagtttactgggaaaattagcccagaaaagggtcggcattgtgattgagagcaaatgcgtgggatacctgaatacaccagatatatctgggattgtagcatatctcagtatatcccaacttttctttcagcaattccagacatatcattaaatgtacctaataacatactgtcttcaaggcacagcccgagaaagacatagtatctatccgaataccagatccagaaacacgaaagcaaactcttcaccgacccatgctctaatcaaacaaaggtcccaaactaaccaaactaaacctcaaatccggattcccaccctgcgcctccattttcaaaaacctcctgacccctaactccaacgcagcctcactaagcgcatcctccccctccttcaagacccccctagctaacggccccttcctcctcccgtctaattcccaaagcgtcccgtctagccccctaacaaaggcaacgaaatgcagatctacattatcctccgccaacggcgcagcggtatcccccagtttcgccgcatccgcatgagcactctccaacgccttactctcatacagcagatctgcgcgctccaccggccccaacgcttccgcctcccggagcagggtatccaagtccgagccagcaacgacatgtttcctcgcctcgccatttgcgaccacgtgcagcaggccgatcagcccgcatgcgttgcggatcgtctgcttgaaccacattaccggctcagcggggccggagccggtgtaggtgtctttgggggcatcttcggcttcacgtgaagcttcgtaggttgcggagacggggaagaccaggaggagggcctgggagggccgtgggacaaaggctaggagttccggctcgtcgatcgagaaaacgtctgtgaagcctaatgtgggggctagtcccagttggtgcactaggtgggacatcacttccggattgttttctgggattggggttagttttggcccttggatttggaggttttggggttggggttggggtcgaacctagtggcacaaaggccttttgagtgggggggacatcgacgtgtgccattgtgtttgattttttggtggtgtgtagataggtaagtgtgtatgtagtatgtctttgggttaaggtgagggttagaaggattgcggggttcgggcgtttccacgttttcctgcatgttcgatgttaattacggagaagacttataattggttttattggctttaatcggctctagttgggctctaattgagtgaaagttcgttagaaacagtattagtctcttataaagtttagacagacaaattgacaagagaatataaaaataaatctgactctccatcgggctggagtttccaaatcaggagcatcccagagcctgaagaaacaggctgcaatgtatgtttgcctggtttgcagcttacgtgtggcgcgtttaagagttagctaggtaacactcaatattaatagttagccaccgatccttaatagatcctcaatagatcctaataacagatccaaccggctaagttgatttgggtaattctccactgacctgtcaaacagaaagcattcagatcgcccatttctcgacagccttaaaaggagggagttaatcaccgaggaggcaccgaacttatccccccgtcccaaagtggatgactaaaagtggacggctctgacaaaggcacgcactaagtgggcggctgcatactccgtgctcgccggacccagaaagccctttgttattcaagacatttagtacggagtacacgccgttagtgtcgggttgatgatcatgatcgccactttgcctgctcaaaactatcggaccttccgaatacatctagtgtcccaccagtaacgatgggattggtatctgatttcccgtcggacccattccaatttcggaggctcgcaggaaaatggaaacggggcctggttaaacaaggctatggacataagattaccagatgctccatagcgtcgacccaacgacatggtagcttttgttcacccctgccgataacttcccgagcactaggaatagtgaaacatcggtgggacttctcatggagaaaaattgggtttttgcgagtccatgtttctcctatacgccatgcttggaagtcccaagatcatgatatttcacacccgtatattcgcgtgacctgacaggggtggtgcaatctagcggctcttcactcagtttatacgcgtggagaaagccacgactgttgtcgatcaccacgaggtgggcttagtgctgtttttccgtggagaccaaaaaagcatctttgacaagctaagggctagaagggctaaaacgttctagttctgctttactcgcccctgtattttgtggcttctcgtggcccgtgacataggagggtgttcttttattaagaatccttctccaccactttgaaatccttccggtatgacaggcattcaagatgacagacgaacagcagagaaaaatggcatgccagaccgtggcagcggtctttctgcccattgccactataacggtggcgctgcgcatatatgtgcgtggctggatcgtaaaggcgtttggatgggatgatggggttatggttggcgcaatggtatgttcaatattcttcaattcgagatctttcccaaaactgttctgtggggttgtatcagagtcagagatctaacaagctctaccccagttattctacgctatgttttgcgggactatgattggaggcacaatatacggcacaggttatatgcttgaccacctcactgtccacaaccgtgtcctagcaaaaaagtactggtggctctgcgagattgcctactgcttcgcctcggttggatgcaagatctccgtctgcatcttcctcatgcgcatcactatcaaacccctccacatctggatcctctataccgtcatgctcttgaccgtcctagcaggcctggttttcatgttgctcatgctcctccagtgtaggccgctgtcatacttctggtttcaagtggcacgcgacgctagtatccacggcaaatgcatggatatgaaggtcattgtcatcatgacctacgtttacagtgcatttgccgccctgtgtgatttcaccgtcggcttgttgcctatcttcctcgtccacaatcttcaaatgaagcgccagaccaagatcgccgtcatggccatcttaagcatggcttgcatgtatgtttcaactcgggtctccgtactagttctggatcactgacaagagattccatagtgcttcatcggcggttatcgtccgtatgcccttcgtcaacggattctacgaccccgatttcctctgtatgttccgactctcccgaaaacaaggccaacgcacgaacaaaactaaccaaatctttcactctagacgcaacataccaaatcgccatttggtccaatgtcgaagccggcctcggaattacagccggcagtctcgcaaccctccgacccctcctccgcatgtggacgggcccccactcagatccatattacaataacaactccgggttcccctccgcgttccccggcggacgctcacggtctgcctcgcgccaattgggtggatgtgataaccgtccgtttcctttgggctcgctggatgacagcggtcatcgcttgagaccggataagcttgctgtcactgttacgactatccacagtcagagggatcctaatgatctttactccacgagcccgactagcagcgaggagaggctgacttcggatcggtcatcgcctcgggatattgggttggggattcaccgcacgttcgaggttacgcagacttcaacggagaggattgattctgaaaggatagctgtgagggaacatgtataagtgacccacgtataacatgactcaaaataatatatactaatatcttgttatcgaattggtccgttcgggttgtataaagtcattctattgactcgtgaagaatgagttccatcattcattacaacttttggtcatgcctcaagcagctctcttatattcacgaggttgcttcccctgcttcaacggctcaaaaatatccgtccacagctcattggcctcgcccaggaagtatgtcaaatcaacatcggccagactagcatccccatccccagacaaagtctcaagctgcgagatcaagttctccagcccaaacgccttgcccgttgcctgcgttgcaccagcttcgagcataacattgacaacatgaatatggaaatggtagtaagtcggttgatctaaaattcaaagtcagcaaaaaaaccaccaacgtaacgaaatgcaactcacaatgaacgtaaagcttaatctgatcctcctccaaaccaggatacatagaaaccgtagcctccagcaccctccccctcaaatatttcaaccaaggcacaaaactcttcttcagatccctcaaactccaaatatccctcctctgcaccaaagccaacaaatgcaatgacccgatactcttccgatcccagttcaaatccggtaacatcagaaacccatcatcaggcccgagcccctcatcccgcagaaccacatcctcctgctcagtcctgccctcaagaatattaaacacccagttcagccgcccctcctcgcgcttcgcctgcatgaacggtcgcacgtgcgcacggtatatctccgccgtctccgtgaccatgcgcagatgctggtccgagtacttcttgatgtgctgtgcggtgcatggccagatgaggttgagtttgaggtcttgctgggggttcgcggcttccgcgggagtggtcggggccgtgttgttggcgtttgatgacgcgagataccagcggtagatgtcgttgtcgcctaggttgttgactcgcgagattgcggcgtggaaggcttgtagcacggcgagggattccgtttcgaatgccgcgcgctcggctattaggatgccttgcgtgttgtcgattgtgcctaggagggcgattcgtcggccattttggtctgggtttcttttagttcattgaggctgcggggtaggaggtggatgggtcggaccttgtttgaggagcttgctcacttgaaatttggtgattagtgcctctggggcgagcttgccggtgcctgcagagtcggccatgttaagctttcaatgtgggtatggctatgtagttaagttcaagatgttgacgatttactcagctttatcgggtggggcggtcaggcttatcttagatcttcaagctatcagatggaatatatgttgcaatgcctcgatatcagtatataatgctgcaaagttgctttgatgtcagtttcaagcaaaagtaaatgtatatcacaaaattatgctaccagatgcactgatctacagcctgaaatctatagaaatcccccattgactccactctaacccaacaagccctcaggcagtagcagactcctttccagtcttccctgatgttagggttgtatgcatctaagacaatcagaaaagaaccagggcaaaagaataacccgaatagatcataatagatgggaataaaacataccgcgtccgcaaactgcagccactcctccactcccttgacaaaagtgtcatctgccgcaggaatagcctcatgtccccatactacaaactcatcaaaggtcctctgaatctccataatcttcactggttcctcgggttcagcctctgcatcctcagcgccgtcattgtctgccggttgagctgcaggtaacacacggtctgtgtgtgttgcgactacacctatatattttcaatggtataatcagccaattatgattcaattaccgtttttgtatatccggaaccctcatttggatgttctctcataccttgatagccatcaggaagggcgacgcgccgacctcgaagtttgcgtccgcggaaatatgtcgtttgtgtattatctggatatgaagaaatgttagttctggtttgtacattagtctagctggattttctccatctagggctgtctgtcttgcatgcctttttcgtcttgcactgtccaataccgatccagtgaatcaactggcccatcgtggtgaatccggcatggaatgatatttggcacacattgcagagccgagtcattcttctcggattgtgagctcgcttttgcgcaaggctggatggcgtacatgtcgggcattgtcttggttgctcttcgtagaggacgattctgagtgacgaggcagtaacggtataaaccaggatattttctgggcctaattgttttccaatctgttcctatgttgatcaagtctggataagagaggtattgcctgggttccgcggtctgggtggttgcgctaattcttgcaaaagattggacgtgaggcgcgacgcgttctccccgttctccgcgttaagtggaaattcgaggatcgactgcaaatttatctatttatccctacgtatattgtagaagttttaatgcgtttaaattcgtactcgtacaagtaaaaaatacagctaattctcgtggaaatgcaaaacaattcaattggcaatgatcggggtatacatgtacagagtgtctaagcatgtctcgaaagctatatcgaatatttaactacatcaacgcttgcgtgtggtcttcttcttcttcttctttttctggccctcacccttctccctgttgtcggcaatcatccgagcaggccatttcttcaagtgctcccgctcaaacgcatccttctcccggcgatacaaagccatcgtagcccgagcatcttccacactagaatgcgctccgtcctggatcttgattcccaagaactcctcagccaaaatcttcaaacgtggtgatccaccacctgcgatcctccgatatggcgggtgcttgctcgtgtctcggatgtcgcgcttaggatggctgagaaggagaacgtccaaatcattgctgacagcatggccgacgagaatgcggtccttcaagatatctgcgatttctttctgaacgtgctcaagggcccttgcctccaccatgtgcttcggggcaatcccgctcacatgtgtgcgccaatctgtgaccatctccttcggccgcacgtacgaatcgtatatttggtcgccgttgaagttcacgacactgacgcgggcaagtgcagagtcgctgtcgggatttggtccgacgcccaccatttcgcaatccatcgcgacgtatttccctagttcggcactgcagctggatagttagtattgatatcgaaggacgggccaaatagtatggctgtccgtctgtgccctggcacttaccttggtgaacggccttcattctccttgtgacgcgaactcgtctcgatctttggagcggacgcatcggctgaatcgccggtctctttcttatcagacattctcttgcgcttgagggttggtttggcgtctcggttatatggcttttgcttctcggtcaactttcgtttcttcacaatgccatttccagagtcgagctcggagggcttgcgcttggcagtaggatccttcttcaatgtcgcctgcagcttcttccaattactggaaagcgccgtcttgtccattctgtgttctgttggtgagagaagatgggaaagataaaaaaagccgataagcaagtaaattttcgggacccactttttattttgcggatagttgaccaggcgacttttatacagcgccatttggactatatatattatctttacggtttttgattgagtgtttagcgtgtagtctttacttaatttagctgtaagtgcttgaaatatattgaaatcaaacccgatcctaacatctaaccttaggaccacattatatgtccagataaacaaaatgcacgcgcttttagagggaatatgcagaatcattcgtacccagtcttgaaatccttcgcagtccacttctccgtgatctgtcttctggccttgcgtgcctgggtgattggtgtgcgagactcgagcttaccttgaacgatcaaggttcggaatctgtcatccaagagattgccttccggcttcaagagtcgcagagaatcctgcagctcgtcaggaagcaccagctccaacggctgtgcgggtacactatagagcttgttagtcgcaacatggacataggaaatgaaaaaaaaaacgtacgccctcttgccaccgaaggtcttcttacgaagcgcagtctcatcaccagcttcatcatcatccgcatccgattgattctcgcgctcgagctccctttctttgatttgctcggcgatcttgagaatatgctgggcctgttcatctctctttactctcgctgcctcccatttcgctttcccctctgctagcttgcgtcggatggccttgttgcgctgtgtcttggacttccgctcggggcgcttcttgttcagccactcggacttctcgtactcgctttcgaatccctcccaggcactctcatcatccgacttcacctcgccgttgtcgttctgggcctcctcaatcaaacgctgcttctcagcttccttggcctcttccgccaatcgcagcttctcggcctcaaccgccgccgcaccatgtgtctccaatagtttatcccactcttcgaacacagggttgtaactggttccgccgtgcggcactttaacagaggggataggcttcccattggcagcaagcgagatcggggcgtgttttaatgtgctcggctcaaccttgggcttaggcttctgcaggaaatcaaagcgagggtcgtcgtacttgagcgtgggttcagtatcttccgcccacggatcgtagaactcattttcggtcttcttggccagagggtttccctccttcgctacttgctttaggcggagatattccttcttgctaacccagtcgctcttgggcttcttcgtcttcggttcaatgactccgtcggtgacgttcgggtttacacgcttccggccgtccagggcggggatcattgaccgctgggcaaggatttcgtctgacttgaggggtttcttttgctttttggcgatagccttgcgtacgtcttcattaccaacagtatcgagaacgaagagctgatcggaaggcttttccgagatgaggccactagcaggagaagatagttaggatcttaatccacaagtaaagagcagaaaaagagataataacggtaaccctaccctgtgatctcggcgtccttcagatcgcgcaaaccctcctgcaccgcggtgatatcgacattcttgcgccacgccttcttgcccttacgggaagtttgcttgaattgcttcggggcatccacggaggtcgacattgtggaaaacaacagagacagacagtcaacgttgatagtatgaaaatattggcttatctttttttccggtccaaaaaaattctggatctgcttatctcagcacgcgcgggggcggtgatcgcggttaccacgtttaccgcgcttggatgagaactcgcttttcttccgcttcaagctgccatcacttacggcgcgtgaactccctagtgccagtggtcgtcattttccatccttctggtggcacgcttgatcttttactatcgcttttcgaaagtttgacactgcgcttagcgcgatcgcacgccatgcctgtcgtcaaaggaggtgtctggtaagtgccaccgttggaactcgccctcgagttctcgtcgctaatatactcttaggaccaatattgaggatgaagtgcttcgggcagctgtacgtgatataactcactaggaacctctctagcctacgttttatgagcaaaaactaactcaatcgcaggtatccaaatatggtctcaaccaatgggctcgagtctcctccctgctcgcacggaaaaccccaaagcaatgcaaggcgcgatggattgaatggttggatccgggcattcgcaaggtcgagtggtcgcgggaagaggacgagaaactgctccaccttgcaaagctgatgcccactcaatggcgcactattgctcccatcgtcgggcgcactgccacacaatgtcttgaacgctaccaaaagctgttggatgaagctgaatctcgcgagaatgacgagctcggtctcggaggacctggcgaggagagcgctgcccccagtgcggacgatgtccgtcgcctgcggtacgttggttttcctaaagctctgtgttcgtgttgctgataccttttagacccggtgaactcgatcccgacccagagtctaagcctgcccgtcccgatactatcgacctggatgaagatgagaaagaaatgctgagcgaagcgcgtgctcgtctcgctaacacacagggtaaaaaggccaaacgaaaggcccgagagcgtcaattagaagagtcacgtcgactggccgttctccaaaagcgtcgcgaactcaagcatgccggtattaacgtcaaggttgtcacgcggaagcccggtcagatggattacaatgcagacattccattcgaaaagccagctgctcctggattctacgatacactcgaggagaaagaccagaatgaacgccaacgagaagcgttcgatccccggaagcagcaactcgcaaataagagaaagggagaccaggacgacgatgcggaacggaagaagcgcaagaacgataaaagcggcactatggccgcctctgctgcagctgcacgagccggccaaatgcagaagattcgcgaggccgaacagagcagcaagcgacggggtttgaacttgccagcaccgcaggtcagcgaaagcgaaatgcaagatatcatcaagatgggaatggctggggataaagctagtcaaatgaccgccgatgaaacaggcactcgggggcttattggaaattactcgactatcgttggaggaactcctatcagaaccccccgagctgcgccggaggaagatcgcatcgctaacgaaatcaagaacattcgagctttgactgaaactcagtcttccctcctgggaggggataacacacctctccatgagggcagttcatcaactggatttgatggcattgctcctcggcggcaagcgatcgtcactcccaaccccatggccacgccattccgccaggcgaatggcatgggtgcgacacctatgcccggtggtattggggccggtgccacgccattgcgcaccccacgtgaccatttagctctgaaccgggaagaacagggtgcccagctcattggcagcacaccccgagacattaaaatgtacgagaatctcactcgccaacaggtgcgcagcaagctggcctcgctccccaagcccaaacaagccgagtgggaattagaggttccatccgaatccgctgagcccaccacatctatggagatcagcgaagaagatgcggccgagcgtgatcagcgtaacaaagaggcacgggagaaggccgccaaggctgaattcaagcgtcaatcacaagtttaccagcgaggcctgcctcgtcccgctgttctcgatattaacgctttgctgcaacgtgcgtcccaggtcaccggcaccatcgaaggcctgattgccaacgaagccgccattttgatcgcacatgactctcgcaaattccccgtccccgacgcgcagattcaaggccaagcaccaaagttaagccaattggacgaccgtttcttggacgcagcacgagcttctattgccgctgagattgcttccaccgaagcacagctgtccgaatggcaagagaaattcgacgacggctggtcgtcagcacgcgccaagtctctgcctggccttgagaactacgaggatgacgagcaggatcccttccaagaagaacaacgcatgatcgcggcctttgatactgttcaaacttccctctttgatactgccgagcgcggaaacaagctcgagaagaagctgtctttgcactacggcggataccagaagcgggctaagacgctgcggtcgaagatcttggaggctggtgctgctttgcccgccgctataaatgagctggacgctttccgtacactccagatatctgaggagtcggctgtggtccggcgacttgagagactccgggaagcagtgtcatttgttatgcggcgtgagcgagaggctcaagatttgtacaagagccgaaaagatgagcttgatgaacttcttgccgggacgggtacggtcaatggatggcactaggtagtttacttcttttttttctgcgtcatgactacaatatcttgctcttctgtacaattactacctcagtctaatttgacgaaccgtacgcggtcattttctggaagatatcaccgagttatccaagttatagtatgccatgaacagtttgataaagattttgcattgatttagctgcttccttggttgatagtgtccgaatatttgaaggctggggcctctgtggtctcgattccgtgaatcaatgccatgcttcatagatctttatatgaagccacaaaaaaagattcattagtaaagcaccaaccccagcattactattcgaacttaccgatgtcacgccaggctttggagcatccgcttgattctcgtaaactccagcgaaccgcttatcgtacttggaaagagcatccttttccaccaccgaaagatcagggtgagaattgccaagttccaagggaggtagggtctccaggatgcgaatgtagagcgccgtcgaaccatccccaacaaccgtcggatcatccgcattaaccctctgtctgaggcacgcgttgaccttgtgggcattgacctcgtagaactcacgaggcgtgccacggttcgcataaacgtggaagtaaaaagggacatcgtggaacttctcgcatagctcaatgatattcattttgtcagttgtccagccatcccagccgtatatgacgaagatgcactcagtcttgcatgtgcgggcttcttcgagagccattcccagatacttgctgactcggctgttggatcggatccggctgtgggcgggctggatgatggtctgcatcttgtgaggacggacgcccaggaaaccgaactgtttacggtgctcggcgagggtgattacaagcagtgagcgcaggtattcgtgcatttggttgctgttcatttctgcatttgggtagttgtgatccttcaggtttgaggctcgggcgataaacaccaccactggaccgagggggttgggggaatcatgcatagctgtcaaggatgggggttccgaggtggtgttgttaccgacaggaggtggacgaggtttgtccggcgattgcttgaaatgaagcatagccgaagacgatgatatgcgcagagattgagtgaagaggaacgaggaatgatggaatggaagagtagaaaaggaaataccccaatggagatatgaaggtttgtttacgtgtacggtctggtggtgtctacccaaataggaaggcacgtctagaggaaagagcgacacagactggaaaattacatggacctggaaggaaggtggataggaagcgcacattgtaaacatacaagtcggtgagatccctcttggacataactatagaaaagtgacaaaatgatattgatatagacccatttctcacagctcatcgcttcttgatgctgatatcgatctttccaatgccccaggcagcgacaaagactgtaagcaagcccgcaaagatggtgagaggcttgcgcagggcatcgaccatggagtgatcgtacgtaacctaatggcgaattagcataattgcgagatgaacaagtgacaatacgattagtacataccacgaacttggagtcgcgcgcttcgtcagccagactgtcaacctccagggtcaaggtggtccggcccagagtatccatgtaggtcttgagagtgttcaagtgagcgtaaatgtgcttggcgccaggaagaccattactgttggtcccctcaagaagctcaaagcgaacattgtgagcaccctcagggagcacaacacgcacaaccacacgctcatactggatgccctcagccatcttaggtccttcaatgagggggaccttgaggacataggagtcggagtcgacacccgcggcacggcgcaggaacgaagcaaggtcattgttccacccaatacggaagctgtagttccagcctccgaagatagggtagcggggcttcagctccaaattaccggcgctcttaccaacactcggacgatagcggctggtcgagacattgccgatatcgtcaatgaagtaaggatcgacagagccaggcagaagcggatatgttagctcacgaagcgccgaagtaggcgctttctggtaggaggtgaaggtccactggacacgcgagaactggttggtcagctccgagccgttgttgcgcagccagtaccgttcctcggttgcgagattgccgccccagtgcgagacttccaagtcacgctctaaaaggtttaccgtgatgacgggcttagtgaactcatagcgaacggtaatggggtgctcagtgcccggggccacctcggccgtgtcatacgggccgtaggtgtatgtggtgcctttgcgctcggggtccgagccggacttgagaccctccgtgggtgtataatccggcacattgttgctggggaacttcaacttggttttctgtgtaaccgtcgtgtaggcggatggcatgtaggcggagaaggagtaggtgaggaattgcttgtccgcctgtccaatggtggcaggaagtgggctgagagaggaaagcactgagtacgagattccaagggtaatctgcgacttcggggccagaggctcgggaaggtgaacgacgaaatactggttgccgctgtttcaattgttagtttaataggcccctgacatggccattgacctcccaattgatactaactcagatggtacagcttcggtatagtccacatcaaagcgtcccttctcgggggctttcttatccctcacttcgaagcctccaacacggtcaaacacttcggcagggaaggggatgtagtagtcgttctggggctgcttgtcgacattctccacaacaacattgatcgtttcccgcacatagctcttttccagattggtattgcgaaccaaatttatgtttttgaaaacctgcgggggcttgaagccggacggaagatccaatcgactaggcgtggtaaggttggttgcagcgcacaggctgggcgcgagcagcccgagcaccgtggcggtgaaaaacctcattctgagtacctggaggacacaatttctccgaggttcaaagggttcaataatccaagatgtgattgtgtctggtcggtgaaccttggaaagcttgcgcagctgatgatacgtggtccccattgtatactagggtcgccgaagcggccacatcgcgcactccggcttatcgctgataagggcctagctgatcgaagcttctcctcatctcgcatctttacttcttgcatacttgatctacttgacttgcaggttgagattggctggaggcacagctgaaacttattttcatatatcatcatgttgtcacacacgatgtttgcctctcgagctgctttaaggtccggctgtttgaggggaacccaactgttatcagctcgtcgctaccatggccttgcccagagcaggttctttaaggtgtcagacgaggtgcgtgatgcaattgctacaggtaaaccagtcgtcgctcttgagacgacaatctatacacacggtgagtctttctgcgttcattcctgggattgaagagcttcgcccaaaagcggggaagccaagactctaatcagctgtaggtttcccttatcctgataacattgctctcgccgcattgttagagtcggttgtgagagccaatggtggagtgcctgcaactataggaatccttggtggcgttgccaaggttggtctgagtacggaagagcttatcgagctggcctcgacagctcaagagaagagcgctctgaaagtgtctcgtagggatctcggatatatctgtggcttagtgagttagctgttgcaatggctcagagaactggaactgatatatatcagggcatggttggtaagaaaatgcacggcggtactacaatctcgggcactatgatcctgtcagaactagctggcatcaagatctttggtaccggtggactaggtaaattcagtgatcaaagctcaatcgaaaaagaagtcaatctgacttgccttaggtggtgtgcatcgcggagcagaaagctcaatggatatctctggtaagagaaccgtgaagcaaaacaaggatccccattattgacaaatgattatagccgatcttactgaacttggacgtaccccggtaacggtgattagctctgggtgcaagagcttcttagacatccctcgaacgctcgaatacctcgagaccgaaggtgtctgcgtgggtacattcgctgatggccgggatggtgccgttgatttcccagctttctttacccgagagagcggcattcgcagtccccgggtcattcaaaatgaagctgaagctgctgccatagtttgtaagtttaccccatgtgttgaaagctacagcctcgttgacggaatctccagatgcgcaatcaaagcttccagtatcctccggcatccactttgccaaccccgtccctctggagcactcaatccccaaagccgagatggatattgtgattgaagaagctatccgcctttcccatgtagagggttaccacggcagtgacaacacgccatttgtgcttgctaagatcaaggaactaagcggtggaaagagcgtagtcgccaaccgggccttgattgagtctaatgtcaagcgtgcaactttagtagctgtggaacttgccaagcttgaacaagctgacctaggaacagggtctcggtgagttttgtttctagatacgagatacgagattcaaccaatgctaagttcttcgatctctatccctatagacacatgccatcaatcccaggtgtagcttttccaagtcaagttgcctcgcaagttgaagatttccccgaaccagccaccgaggcacctattacaccaactctaaaggcagatgtcgtggttgccggctcgctagccatcgacttgtcctgcgactacactccattcggagacgaactcacacaggttgcaccagtaccacatacctccaacccagcaattatcggacaaagcctaggcggcgttggccacaacgttgccattgccgccagctacgtcggcagcgatgtcatcttctgtagcgtcgtcgcagacgatctcagcggccgcgctgcactctcaacccttgaaaaagaaggcctcagcaccgcaggcatccaagtcctcgcagcgacagcaagcacccgcacagcccaatacatcgcaatcaacgacaccaaaaaagacctcctgatagccatggccgacatgggcatcgtcgagctccccgaatccgaactcgactttgacggcttctgggaacctctcctcgaacgcacaaagccaaactgggtcgtcgtcgacgccaactggcggcccgacgtgatggccaaatggagtgctgtagcacgcaaacacggcgcccgcgtagccttcgagcccgtttcaacagccaaatcccgacgtctattcggcaccggcgcaaacagcgccggcgcgactatcggtcccaaccagatcgtgccaaataatgctatcagtcttgcgtgtccgaaccgcctcgagctgacggctatgtttaatgctgcgcgggaagcatctcttttcgagtccgcggaatggtggcatctcattaactcgatgaatatgtctccgacgggctcgcgccagcaactcattgcgctcacttcgctgtctctcgttgacgagggcattccgcagcagactgttcagctgcttcctttcattccttgtatcgttactaagctcggtggtgcgggttctctcctcactcagcttctgccgcctggtgatccccgtcttacggatccggagtctgcgccgtatattctttctcgcgcgtggggaccggacttgcctttcggtggtgtttacatgcgtctgttctcgcctaatactattctagatgccaaggacattgtcagtgtcaacgcggcgggtgatacgctgctaggtgttgtggtggctggcttagccaaggatccttctgtgcgcgtggaggatgtcatttctattgctcaggaggcgagccggaaaacattggctagcgctggaggtgtgagtaaggaattgggtgagctgcggggcttattgggactgtaataggtagctgtgaccccgtactaatgacgttgattgcctggatcggaagtcaactcgaggcactagcttgctcagcggtgcttggccaagatctataaaaagaaattaatcgtttagacagacatcgtttaacaaagactttatgacttaaccgattgcaggatgtaaaaaagggatgtgctgttaagacgtataaaatcattgccatgttcattaagtacacattagttagtcgtggacctcgccttcagtggccgagcgaggttcccatcccatttcagccatctcaaacgactcgaataagaaggccggcgccaccgtacaccccacgagtgtccaatcacctagactcctcgcatgctgccactctccacgctcaacgatagcctgtggccgttcgccctatatcataggaattaagcattgccaagtggagaaacacgcgaccatatatataaagaaataactcacctttgcaaaatcaatgcccagaatcatgtcccgggtgggtttcccatcatcccaggatagtgatagttgcataggggcgccagcgtagtagtgccatacctcggtgccatcgagaacacggtgccattgcgagaggccactttctccctcgagaagataataaatacaggtgctgtgcgagcgagtgtttgatgaatggcggtcgcggaaggtctcgacgtagtaccctttttctggatgtggggagagattcaaggtcttgataatctcttgtgctgaaagatttttcgccatgctatctagagagtagagatgtgcttgggttaaaagaaaggagacggtgaagtcaaatatacatttgtttccctatcccctcgattagtcagttgtggtattgataggcgtctgcatgcttctctcccctctccttagcaaatcacatctcggtgacgtggtgatacgatgtagatctgagacaaggttaataagcaaagcaatccagctgaaacatgcagatagatgcaccagttggaggcatcagaatactttcacatccttccagttgaaccttagcccggaatcattgcgagctgaacattacgtatgggcaacatatatcatggacattgatgaagtgactcataaggttagccctacgttcccaaaatactatgcgaactgtctcgcccgcaaaagcttcgaggggcttatcctcgtcagcgcggccacatgtccgttgaggatcacgacacttggctcctctcgaagcgcatttgaatacgaaaactccactcccgataagtatatcgttttgataatccctattaatcattatgcagtcattacaagacagagacacctagtgctaaaacactaaccaacgctcaatatccttcgccggattttgatgacggcacaagtcccggatccaacaatccaacctgcactagcacaccagcctggtcccaataaagattctggcgtgttatctgaccagcattgaaggatgccactacaacgataatgacctggatatctcgccccgtcggcgaaacaccaggtagcagccatggaatctcagcagtatgccgacaggagaacaacatctcatccacgatacgatccacacctacagtgcgtgaaagcaggcggatttgctgatcaaccggcccagcaggaatatacacatgagcgaagaaatcccgcaggcttgcgatatcagagcctgtaatatacatatcagtaaattcccgaaccagatcgtaggaaataaaagaggaaaagaaaaactcacccccagcctgagtaggaatacacttcacaaagacctcaccagcaggacaccccatctcgccataatgaccatgaccggtcaacatccccaccgccggctcagcactagaatgctgatgttttttccgcatctccatctcccccagcacacggtcccagtattcttcccagacagtctcgatatcgataacagcccattggctcccaacattgaacgagcggcgcagacaccctagcgtgcgactccacgccaattgcgagctgatctcgtcatctgcgttcaattccacatccatttcgccttctttctcctcggcaacttcccgctccgcgaacccggctttggactccgggtacgtgtacacgtagcatcggtgttttttcttgtaggtgacgtcgccttcggaggtgctgagctcgatccatggccacagcgcgcagggctggactcgtgggcctggaatgtggatttggattgggaggtatgttgacttggcggctgggccgaagattgcagctgtgtctgagcagcctggtggcgagcagttttctttttccttgtaggtgaattggtcggttgaggagagggggtagtaggctatcaaggcacacaggtgtgggaatgggtttgtgttgctgtatactatgtggtgtaaggctaggaggaggtaggcaggtcggtgatatgctggggttggttagttgggttttgctatatcttgcagggctgaggtttctgcttcgaataacaaagcatatatagaaatagacaagaaagtataatagaagacgtaccaactatcgcataccgctctccattctcgagttcgtcttctttctcgtgcaccgcattcttcagcgctttcatatctctctctacattcccgctgccgaggaacgggatatagatcacatcgaatccttccgcctgaaagaggtggactagatgggtatcgaactccacggtgtcggagatcaggatgaggtgtcgggaagatggctcttcatatcgccagctgcgtgtgccggagctcgtgctcactgtccggcgtattccgtgcggatgggatgctgcggaattggggcccgtggtgtctgcgtctaggtctggtgggttactgctggagctttgggctcggcgtcgagtgaggcgttggaatacgttgaccatagtctgaatgtggttgattagatgagctgtatttatattgggagtttaggaggacatgtagtccttttatatatggaagtttctgcttcgtttcgggaagctcgggttggagttcttggtattacatgtgtcaagacgagaaaatagatgccaatgcttagggtttcttgggtgacgtcgttgatgttgcataccacgataagatatggtagggctgcacatcttcatgcttggaaaaagcatctaatagaatctagaaatgacacgtcaacaaaaagatccttcttctatgtctatacagcgaaatgatctgcgctatagggaaaataatcgcaatgaaggatactcatctcgccaacccccaatggcatgatatatctgaccccacttaatcaaagctcaccaaccaccgacgatcctcgctgactttctcggatgttttaccgctgtcaacaagatagctcttgtaagcgtcgcgcagcagactctcccgcgcaacctcacaatccacccgaatatcctccaccaacgcctccagcgagacataatcaaactcaggccgaatataacccagaatcagcaggttgagtcgcgttttgtagaaatccggcaagcgatggaacttagtatggccctcgtgccccgcagcggtgggcgatggttccgtgagagcgggcatgatatggatttcctaaagtggacaaccacgttagtccgataccccaaaaatacgagcgcatttcgtctagtttattgtatatcacgtaccacagatcgcacggtatttttatagaaagggttatatccgatactcaacacagccggcaaaaccaccgcagtagatgtgctgccctcgactatttcatgtttgtatgttttcgggtcgagtgctacaacgccgaagtagacgccgcttgtcagctcggggtgcttctcggacaggtcgtcggcggggatattggcggtgggaattccgagctgtagtcatccgggagagcgagtcagcggtaagttcattgtgcgtgttgcgctgcgcgattatagcaccgaggttgagtccgcagagtcatggacgtacgtctttgctcccgcggccaaatcccttgatcactggccctgacagtcgcacaggataaggaggttccggggtatcggggccggctacccggtcgcgcagcttggagcccatcgctggcggttgaggttgaggttgtgtggatacgggtcaggcttgggatgtggtgaagcgtgtatattggcgcagacaaatctgctaataagtttgttttgtttggcgtatactgattgtgtgatttagcaatggtttggcgtgatgctggcgttgagtgtgtctgaatgcgaccagccctggtgggggttatcgcgataaggatgcattgcgtacataattaaggcgcctggggtatcaggcattaaaccacatgtaatctcgcaaaaagcggcaagcactaaaacggaaagggaacgccaagaagtggcagaggaaatcaagtacatacatagggagtagatatatatttctactacattagactaattacttcaacacttcaacccaagtacattcccgtctctcatgtcctcagatcgtttcagatcgtcacatacaatgctattagtaccgttccggagtagcaagacagtatatacctacactagcaaaattaagtcacttttgtcaaataactactttatcatctgcttcatcgtcaacttatttaaatttagatccatggatggttcaggactcaacgaggtcagaagtgaccccactcaatatcatggcattatgctcatacagtaactatcccgtcccagcttttgtcccattgtcccttttgagcgccacaaataaaacaagaaagcatatcgacaatcctggaattgattccaggaatccaagaagcataacttatatacgagaacatagaacatgagaagaccctgtcggccagtggtccaaaagaaatcaagtccaaaggggatcatacaatcccagaatcaggaaatatgtactgagtagaacagcagaagaaaagaagacaggcctgatgtcaggccttgccgagggtatgaaaaggtaatctgaaacaagagcaggaaacaaaatcaaatgcatggcaagaactggaagacagcggattagcatgtaatcaacttcaaaaggtcgtgtgatattaattagaaactcacattcatcacaatgagcatcgggatatcgaacacatcgcgtttcactgtccagcagtacgcgcattcgacttttccgtccttgagaccgagctggttcatgccggcctcgccagcaatgccactcttgcggaggtggttgttccactttgcattatcatcagattgtgaaacatccatgtcctccttggtcttatatttgagcagcttgcaccgagtcatgacactaccacgagaatcgccgaatgccagacgcgcaaagtcttcgtagaactcgacaacgctgtcatcgtcgaggagttcggccaagaataccggttgggggcgtccagtgttggcatactctaatgtggagccgcgcggtgtgaaactcccgcgtgacgttgtcccggattggggtacgcccgaaccggtgttgacgttgaggtttttatcttttcctagaagcacgtctttcttccatccggttaggatgctgaattccttgcctacggcggcgatttcgccggtgcgtcggcagacgatggtcggcgttccgcatgcattgatgaagtcctcgtactcccagagagttcgctggaagcatttttccatgaagatgagatcatcgcgattaagggttttagtagttgcgataaaagagggtcgaatagacgcaagcgctttagcaattcgcacggtcttttgcggcgaaaagcgacgctggatgaaagcagtgaggttgtggaagccacttgtgtaagcatagggctccttcacgctttcgtatattgaggaaggattgcggtggcgtcttttagaaccaacatgcagatttggatgcttcagtattgatgctgacgtcacctggcgttgtccattcggcaccaggctgttggacttgggagcagaagcgatattgttaaatgtgccgtcctcgaatgcagccgttgtaatgttcgggcttggggctgagccaggactagtgaagtttgttggcgcactttcgatcgcaaatgcatgtggtgcgttttgtttcatgtgttcggaaagcatggcattttggccatacacaccgccgacattcacatgttggcccgagggtgcggtcgaccattcgtttaggagaggatcgccaaacatgaaaggttgattccccgggctttctccgaaaccgggagctggtgtggagaactgggccgagccactgcggccgatcgaccctcgctgtcctgcagaatcagtaggagagtcaccggccgcgccggtggccatgtgcccaagcatgccgaattccagagcaccgtatcgattttcgaagttcatactcgataaatcgaagttgaagagagctggatcactgggatcaaaaaatggccctgcaaaaggattttgagactgacttgtatccccagaaagagcagtacttggagtagcctgctggttcacagttgatgaaagacttggatttcgaccattggtgctgctcttcatattgaaagtaggtgaaacgggtgattgcgtggtaaaagggctttggctcatggaagattcttggtagggattgtaggatgctgtctgcgtctgaggcgtagggtaaaagttgttgctcgtagtactggttgtttggttattgtgttgatgagtgtgttgttggctgagttgctggttggagttgacagcatttgcgccatttctagatataggcatattattgcggagcgtgttgttgtaaagattggtgctgttgctgctggtggtactaacagctggcatcaatgccccatcaggagcgtcatggagatacttggccttcttgcgaacaccatcatggcaagcatcttgaagaccacgtttgatgcaacgttgacacggtcgttcgtcgcctaaacccgatatatattagtcagatcgctaacaagggcagggatcagtctatcatcataccgcaagtcaaatgagctcgttggcatgcaaagcaagctcgccgagccttctttcgtcgcggtcgggagggatccttggcattcgctgctttgcgatccgctttgctatcgccattagttttgggctttatgtccatttgctcgtgttctgtgatatcggcagagtcccgatctccactgtagtcccctgcaggacccggggagccgttcttagcttccatattcatttcggcatgtaccccgagaacggtgatctatggacgcgtccacaaaagtgagggagatcggtgtttcagatccagtaggccaccttccgtgccttcttttgttgatctaaagaaacagagcgtggtggcgacaataccaatgataccatgagcgcttcgtttccggcgggcgagcggatccacgtgcacaatattcagcccagcttgtgagtgggaaaaggaaacgatcgcaaagtcctaatcgtccgtgtaggttcttgaaatccacccaaatcacctctcgaaggttggagagatctccggtccttggttcctataatcgcgcgtttgcgactacagttggtggggagtcggcaccggaatcacggcgagtcgagtcacgggtgtaacgggggacaatcgactggagaagcgacggatgtacgatgatctgacacattgaagggtttcaatgtggtgggtagatagggagaaactggcgcaaagctaacagcagaaaaataccgcaatggttcggggctggagtggagtggacggcttcgttcggttgcggggaaggtgtgaatttctctccaaacacgagagccgtgccgatgcgaggccggtcgagaagctcaaaaggaagaaggtcgagaggcaatgcaaatattattcgcgcggagggttgaagaagaagcggatgattctaagaagggctctcgatcggagtgttcccgtgactattgtctaagcaacaggactctaacacgacacagtccaattgtaaaggacttgtagaggactaactgagactcgcttgagcgatggaatcctttttttttaatccttttttgtgtattttttatatatttctttcacaatggcttttagaattttggcactatatttccctactaaaaaggcgcaagactatacttagagtatgtactccgtaaaaaacagccactattttacctgattaatttttgttttttttttttttgctacccaacctaatctcacgttgggcgtgtcttaattgaaggattatctctgatcagaaatcctgcgagtatagggttctataagaaccaaagggctctaatatgtacatcatacattcacatgctgacgttcagggcgacggtcactggaggcattattagttatgtatttgactatgccaagtattacggctttcataacattaccagaaacaacctgtaatttaagtgcatccacaggctctgattggttgaactacaatccaataccagatcgggttcagcgcataccagatgacctagacaattagtagccccgcggcacgtgcctaattcgattgtatactctgtgccttgttagcttctaaattacccaacgttcaatgcaagtatatccaatttgagtcattatttttttctgtcaagctgaatcgatcccgagaaacccggtccagactttccacagttctcggcagcacgctccgattccgttttgttccgaggcagactggatgcgctctgccgaggctagaaggatcgcgacagttataccgctcagctatgactgtacttttaaaggagggattgtcatgtctgcttgccgccaggggtaagttggttggggatgattgccggtgcatgaatttcaagaccacatgaccctcgtatgcttcgcaactggactggcagactgggggtcccgtcggagaattaaagcctgggccaggtccgcctagtttctattcttggcgtgggtgggatctatttacccctagtgtgtatataaaccccgctagtacatagtatgaaaagctataggtctgcttgagattaagaacggctagatcgaatatgcaagatgcttatatggaatcaaatagagctaggatatagagcatatccttgccgatcatgcgtattattaactatgattttatgcattggcttttacactgcagacggtacagcagctcaaagcgttatgtcctgacatccccagtagccaaacgtctcagcccaaggggttcccaacatctggtcatggatgccgtgttcatctccttggcgcacggtgttcaagaccggttggtaaactgttgagatgcaatggcgccgagggtagacctgtgtcctcgcgaaatagccatgcagccagcgaccaacccgcttgagattaatgtatgtatgggttattatatgtgcaccgcagcatcaatcacgtctgtgatttcgcaaacttgcttttacttcggatccatgccccatggcgaaagaataggtatctatcatcaatgtcagtacaatgttcggcagacagatcaactcatgttaagttattgtctttagatccacaaggaagctgggatgtcaaacttccatccttgaggcgacttgctggggtttcataatgcagggggaagaaataggtatagcgtaagaggaaatcaagtgtgtcaaaaccagcacgtacggaaaagggaccatgacaagggttaggaacgctaacaaggaagttgcccattgatatccaaggttgtggtacactgcataaccgttagccataatcgttacctcaactgtgtgcaggcaagaatgtagctgtcaagcattgcagaagagctactggtcggcctgttcagaatacagcgcatccaccgcattggaaatatgcgcttcatgcaaagcacgggcttccaattcttatcccagcacaacgagagtgtagacaaacttactttgtattccaaatagcggaaatatgcctccaaaggatgaccgagcgaagctgttcgctgccagagcgctggcggcaaaagtgggatatgcatcgaccaggaatgtgaagatacccgagtagactaggatcgtcctagcagtaacacgatccaattagcatcacgcggccgaaaaatgcgcagacaaggatggtcgcccggctaggtggggttgaaaggttgatcttaccctgcaccaaaaacagcactgccaataataggcgcaatccaatggacgttgggatagattgtccaagcaaaaatgaaaagacctatagtaaccaagggtcctcccaggatcgctattccatgaaagtcagccattatactcttgggaccttggcgcctgagcaattatgttggcaaacttacctgggggcagtcgccactccggctggaagtcatcgagcgagttagtggtttttctgtaattgcgctccaagcgaatgtaattttggcgccagatcggatctgacaaaatggctataaccattccgacaaacagaccgaggaaacacagtccacgctgccatattactagcccatacacatcattgaagactagctggaaagcaccaaagaagaggtacagaatacccaagaggatggccgagaaaatgcaaaggcatagacacattggctccaatgttaagaggagaacagggcggtacatggatcgcagaactgtctgggtcacagaccgctgcagcttttcgattggagctttccatcgctcgtctccggtttctaggcgcagcttctgcgccttacgcctcaaaagtctagaacattattagcgtcgtgatttatcccagaatctggaaatacatacactgggtgatatgtctccggaacgaagaatataatcgaggcgagcatcactcccgtccaaatcaagagcacataaaacgtccaacgcctgcgagtgatataagcttcaatagttgtcagaattcaatataaaacataccatgtggtaaatgcattaatgaagccaccgactctggtgattatgttagtattaagatcagagggtaggcaaaaagaacgacctacagaggaccaacttcgggaccaacaaatggactcgcagtgtagagcatcatgggaaaggcaagctcatggcgatcaaacatgtcaccaacagtgcctccagcaacactcaaaaaggcactgcctgaaagtccggtgaaaaaccgagcgataaccatggtctcagtattcttagccaccgcgcatgggataagccagatgagaaacagcgagtacgaaacgagatagatgtttcttcggccatagaactaagagaattcagatcagcaacgcaatatctagcagccaaagtctcaaacgtacttcagataatggactcagaaagagcggaccaattcctaaagcgaaaaacatcaacacatagtcccgcgtaagacgacaagatcagcacggaccaagaccccaaataaaaaacgacaacccaagagtcgcaacttcctgcgagcatccgaattcactcatcaactggtcatatgtcgtggtatacatcgaagaggcacaagtcctacatgcagtaagtcagcttctatgcggcgcagagatttcaagaattaaccggctgtacactcacacgcaaagagaacccatcgagataataacgacaaccaaccatctccgggctttgctcatattgcgcggattcataggatcgttctcctcccagcccacaatatatgattcatggtcggtcgccaccgcagcctcgtcgacatcatggctggcaacgctgacgccgtcattcaatgaccagctgcgttccaggggcttggatgtaactgatctagacgcgctcgagcgcagttttcggagcggtgtgctgccttcttcgtgagtacccggggaggtgatcgcagcataactcagatcatcggatttggtgcggtcgaatttgatagcacccttaccactagagggtctttcggggccgatgcgggatttttcttcgctagggtctgggtgcgacacgtctgtacttgaccgcggagacatggtcaatgggcaaacggtcaattgttagatttgatcatctggtaagtctttgtgttatctatgaagtcataggaaacaaatcgaacggtatggagctacctgggtgtatgtattgattagcggaaatgtgagtcactgtcttgcgagggaaaatgaaggggattctccttagcgtctagaaatcaaattcaacctcgggacttccgagctgatcaatcagtttacggggtcctaattccgctatctcgaagccgacctcgggagtgattccgccttggacattgattaagtgtaattctaaccatatgtatgtaatgttgtagaaaattcaactattctacaactagatagacatatatcgttttcaatgttttgactgtgacattagttatcggatgccaagaacgtaaacacgtgggaacgttggtgcatgtcgcacggagctactccgtactccgtatataattctccgagatcgtaggtctaaaacattgcagacaagaacaagatatgcttgagacagagatatgttcaattaagctagagctaaaactactacggaacagaaacaattcatcaacgtcgcttccaagggaccaggtgcccaaacaaaaacaccaacaaaaggtagtaaccaaagtcctgtctccaagctaaccctaaactcctcatagccattcgaccgaatgctattcccaaagaaaacaccggatctcaaatcgagatattacggaaccatcccaaagttgagctgtacaagaaaagaaagatgcgccaatagatcccagaattttggccaagaggacacattctctaaagagcctggctgagctgactcatggcaccagaagcgttttcctcggcccaagaaccccagagtgcctgctttccagtgaccttgagaggaccaccaatagacttggcgccctggtcaaccttgacagcatctttcgtggccaacaccaagatttcgaagaacattttggtagcatcggccttgctggaccgctgctcgggaaggagctcctggaacaaaacgctcttctcctgctgggtggctgggctaccaagcttctcgcggagaatgtgcacagcgtgcttggtgcccattgaaaccggttcggtatccacggggtgcgcaatagtatcatccagctcatccatgggctggttgttatcgtcgtcctcattcaagtgcaatacatcttcatcatctccagggaattcaatctcagagcgctggttcatagtggtatcgagagcgataccctcgtcaatcgggaccatggcttcctcgtcaccaagatccagggcaggaacgtcgacggcagccacatccatatcggaaataccactatcgcgcttgcgcttcagctcaccggctttcttgacggaatccaaagagagcatgccgcgcagttcgggtgcccatccgcgtccacggtcctcaccaaacacactagacacaaagttgccattctgctgtctggtcatcagagtgaggagaacggggtcgcgtggcaagaatgatgcgggcttcaaaatcgaagagcggtcattttgctggtccttgatcttggagctggagatcgcaacttgtttatcgagtcccataagcttctggcgcttggtgcgttgaccctggtgggcgctaacggcatcaggggttgcggatacatctcggttaatttcctcttccagctgatttatctgatcggatccagcatcggaaagggggctttcggagtcacgttcgaatcggttttcggcagcacggggcgtctcgccaccaccaaagtcgttatcgttgttgaagtccatgggaccatctggcagtaggtcgttcaggttgtcgtggacatcatcgccaaggtccatcttgtcgagagcctcatcatctccaaggtccagtccgagatcgtcgtcgtcgttgaattttccagcgtcattgaacagatcatcccctacgggccggggcgcgggagcatctcgaccaatttccatagtcgggtcatttccaaggggcacttcatcgtcgctgaagttaagatcaacaagggaagggtcttcaaggcgtgcgggttcctgagaaacagagcggcggaagctactgtctggaaggaattggcttccaaaatccatgccaccagggcgcttgccagcaggctccagatctagagtttgagggaaaagcagagacgtatcaaggttggtgaaaagatcagattcagtgagcacgtcgggaagagtaatgccacctggagcgacgacagtcgaagtcaaatcattgttgtttgtgagacggaaagcctgatgtatcattagattgaaccaaacccccatttatgcaaaacaatacgtaccattttaattttcatcagagcttcattgcaatcgtcgaggaggtagcgagccttgcggctataaattcgaaccacacccaacagcaattgaccacttaatcgcagagccataggggcttgaccctgatcaacaatagcattgacactgctctcaatatccgattgcaggatatgcgactttgaaagtttgcgttcgatattagccgacaaccaaacgcgagccaacggcccggttttcgacaaaagggtctcggaatagaacatggtgtgtttgtcgcaacgagatcttttacaacggcgagatatctgtcaccaaattcggtaggcgaaaaagacccgcccggcgcgggggtgaggtgtagaaaggcgacgcgctgaagccgggaaaacaatgacttgtgcgaggattcgcacttgataattgtatgaaaaggtagatatgtgactaagagataaaggtttatcactcgatcgcgtgaaattaagacatcgaagagggagatggagagggtatgtgcgcgggagggatatcttggagttggctgagaaaccaaggaggaacggaagatgcgcgtcggtgggaatatcaggcggcaatggcctgggcgggatttttgctgacgtaatcgagggggctgggaatgtcgggtcacgtgagggtacacaaaggaacttgtacggagtccataccccgacgtatcacaacaatgaatttgctacgaacgaaaatttgcctcgttaataggcaaatatggaagagaatatcaattggactttttgtttctcaccaaaccacagaaaactcttgtataaatcagtgcatcgtatactctgccctacacgtgataccttgcgctagtcttattatagtatccggataaactccctacccgagatagctaggccacaatgggtaaagcatcatcatggggacttaactagcctcttccaagtggactcggtactctgaatgggaatattttgcggttttgattttagcaaaaagctgtttcaaatcccgtttttggtcccaggtcctctgtcggtcccttgtttgtcgtcgaccaacttgcgccgactccgcaaatccagcagttagttaagccgcccccgtgtccacgggtgaatgccagatcgcatctaacgtttattgtcgaaacatagtcaattcttacccaaacgggatgaaaactacttctcaacatatctaacgtcatattttatcgcctttaattatccatcctccaaagcatgagcaatgtcaaggtccgcgacaccttcattgcctttgcataatgcatcaaacagcgactttcttcgaccttcctccacaacagccatgactggacggccaaatgctccatcatcagtaagtatacttgactcacgtaccacgtgtgctgcccttcctccacttcttcacgccgtcagacaatggagtttctaacacatggtcttgttttcttccagacatccacttccacatattcatggctcgagcctcatgaaactgccgagcgattacgaacctctattttacatggcctgacacccgtcgaggcagagatacgcttagccagagatggaccgaacgagcttcctcacgatgagccggaacccctctggctgcggttcctcaaacaattcaaggagacgctgattctcctcctcctcggctctgctggaatctcttttgtgatgggcaactacgacgatgccatcagcattactctcgcagtaacaattgttgtgactgttggctttgttcaagagtatcggtcggagaagtcgttggaagcattgagccgacttgtacctcattatgcgcatttgatccgtgatattccaacaagttcctccgcggtgactgagaatggtggttcatcgcccccaggtttctccatggaaatggatgaaattcggagcaaaagcccaggctcggcgtctgccgcggtcaaggcttcttcaacagtccccgcgaacgaacttgtacccggagatttggttcttttcactactggagaccgcattcccgccgatattcgaatcactgctgcaacagatctgagcattgacgagtcgaacttgactggagagaacgagcctgtagcgaagtacacggaagctttgcgcaccacatctggcgggaccgcttcagcgccaaaaggaatagcaccccctcgatctcccttctacgatgcaccggcaagcggtgctgttggtgctgacattcggttgaacgagcagcacaatgttgcgttcatgggtaccctagtccgctcaggctatggtcagggaattgttatctcaaccggcgcaaatacggagttcggcagtatatcagcttcgctacaagagatcgagagccctcgaacaccattacaactgtccatggatcgtttgggacaggagctaagttatatatctttcggtgtcattggattgatcgtggttattggtcttatacaaggtcgcaagattctcgaaatgttcacgataggtgtctcgctggccgtcgcagcgatcccagaaggcttgcctatcattgttactgtcacgctcgcgctcggcgtcctgcgcatggctaagaggggagcaatcatgcgaagactgcccagcgttgaaactcttggctctgtcaatgtcgtctgctcggacaagactggaactcttactctcaaccatatgacagtcaccaaaatgtggcatttcgactgcccagaaccattcgacgtgcaaagagaaatgacgtcagttacttcttttggccctgcggcgcaaacaatcctgcgcgttggtaatattgcaaacaactctcgtttgtcacggatgcacgcaaactcgccggccagcgcatcttctgcgactgtactttcgtcgaccatcaacagtgattcggctgctgccaagagtcgatgggtgggtcagcccactgatgtggcaattttggatctaatggatatcctcggagaagatgatgtgcgcgatcgtatcagcgctcgcgtccatgagaccccattcagctccgagcggaaatggatgggtgttgttatcggcgattctggtggttcaaatggaggtccccatgttgcctatattaagggtgctctcgaacaggtcttggcgcgatcggatacctatctcaccaaggatggtcgggaagtaattctagacgagccccgtcgcaagattattcgggaagcagcagagaacatggcatcggagggtcttagagttcttgcctttggcagtggagttgttcgtgatacttctagaggtggcagaggctttggcagtcggtcgtccccgaaaatcgtacaaggtgatgatgacgagcggtacaacggcttagtctttgctggattagtgggcatgaacgacccgccgcgtaaagatgtgcacaaatccatccgacgcttgatgtctggtggtgtcagagtcatcatgattactggcgacgctgagacaacagctgtggccattgcgaagaagcttggaatgccagttaacgattccccgcatgcccgttcagtcatcggaggcgatgaactcgatcgtatgactgccgctgaacttgcccaggcaatctcaacggtctcgatctttgcccgtacgagcccagaccacaagatgaagattgtgacagcacttcaagcccgcggcgatgtagttgccatgaccggtgatggtgtcaacgatgcgcccgctctgaagaaagctgacataggtatttccatgggcaagctaggcaccgacgttgccaaagaggcagcggacatgattttgacagatgacgatttctcgaccatcttgcaggcaatcgaacagggcaagggcatcttctataacatccagaatttcattacgttccagcttagtaccagcgtggctgcactcagtcttgtactgctgagcaccactcttggcttcaagaatccgctgaatgctatgcagatattgtggatcagtgagtattcctgcatccgattctatcccttgtatttcactaacaactattacagatattcttatggatggcccacccgcccagtccctaggcgtcgagcccgtcgaccctaccatcatgaatcgcccgccacgacccaagacggcccgtgttctgacaaaacctctaatccagcgcgtcctcacctcagccatggtcatcatggttggcacgttgtcaatctacatccaagaaatgggcgatatcaccgacggtaacccagtcgaaaagcgctcccgcgtcgtcaccgcgcacgacaccaccatgacattcacctgcttcgttttattcgacatgttcaacgcattgacatgccgcagcgagggcaagtccgtcctacgtggtgaaatgccgctgtttgggaacaagatgttcaattacgctgttcttggctcgttggccggccaggcctgcgtgatctacctgccgttcctgcagcgcatcttccagaccgaggctctcgccttcgggtccttggtcaagctggtctgcattgccagttcggtgttctgggtggatgaaggtcgcaagtatctgcatgcgatccgtcgtcggcgtggggtgggttctggttatagcgtcaatgtctgatctactgagacaacgggtgtacggttcggatttcctgttacgattttagaggtgtccatgccataacgtgtagtttatcatatttggattgatatcccccatatacataatagaaatgtcggctgtcgtcatatatgttatgccttcggacccataactatatactccgtatagcacaacgttatggctactctgtactcatctcccactaacccgaattctacaaatttcgatagacgcatgttaatagaataccatttcattcccttgattccttgttgacttgaaatttccaaattcatagatacattgctcaaaaattcccacatttctcgaccgacgagacccagttccccctcttagagaattgcaatcctaaacgaagcctcaatatcactggcgagcacgatatagagtgtcatccgcagtcagcattcccagataccataagccaagcgcaaccgtgagctgcggctctttggatgtgccagtctgggtccaggggatcggagcacccagcttcaagttcccatcatcatcgactcgctgaattggaaccagctcttggtcggtaagaatgaagccaaactgcgtgccatgctgcgtcatgtaccagttcacttgtgctagaggtttgaagaattctggatcaataaaagaactattcatcatgctgggtgaccatttccatgagggcttcaggtcgcctggaaggcggttcagactcaggacatttctattgctagcttcaccagcttcatagatcgaaagatctgggatgaatttcgccagcataagagcatcagggcctaccccgatcaagatattggtgccatcggaaagcacgtcaaggactcgatcgagaacttgattgaaaagaagatcttccggttggcttggagcctgaggctcagcctggggatcaacttggggctcggcacgttgctcagcacggttatcaagatgttcaaaggtacaccgcagggaccgccgaatcagagcgtgaaggtcttccccaaatgcgaggggcaggtcactttcagacgtgagctcccgttgtggactcggggaccgaatagtatgacgctgaatgcgaattgccctgagcagcgggccaaattcatgcatgatgtcgtctatattgaactccgtccagacaccaacaacattgatcttgttcggatcatacgatccattgttgtgctttgcttcgattgtccgacattgcgaacttgaatgcttggtggtgcttgtagcaaataagcgagtagagtaacttggtttgccatcttgaacagaataaaaaggttgagagatgataagtcttgggaaatgatagttatcaggaaatgaggattgttaggagatgataattcagaactgactcctgtgaataggtgttttatatatttgagatgggaaggatgaaaggcataatctattagcatctccttcctattcgaggtcaaccgaaagcccacgtccccgaagcgccatgacaaccaacagcgggaactgacagaggtaatcattggcaatgctcactcgaatcaaagcgctaagtgtgactgaaacgtatacctgcagcgggggccgtcaccgggtacatatgcatacaagccacaagaagatcactgacctcgaataggaaggagataccaatagtagtaataggtcatcataagaaaatcattaactatgctcactcaaagcgaagcgctaaggcgtatccttgcaccggtagctttgggatcagaccacaggcccctctaggtctaacagatattactttggtctatgtcatggcctagtggtaatatgtgatatccgctcgaaattgtaagtcgttttcacctgtcaccaagaagggaaagaatttcaaagaaaaaaaagtgaaagaatatgcgagaagacgtctaaaaaaagactatcacaaagacatcacagagcatgagcccactatgtattctctagggctgtaaatcacaacatcgaaagccaaacgccgtgacctacatagaagctctttgacttgtctttgacttgtcaagccacacttgtaaatgattggctttgttatcacaactcactcaacgtgaaacgctgtgatcaagacacatgcaggtgccttggaagggatgtacttttgtatagtcatattctgccatataatgtcgccttcgcccttctatcccttcctttttctccctccctattccacttatctttaagacctatcgcgctggaaccaagatgccatcatcattttgggagcactatcgtcacccagcgaagaatattcctccacgtaaggtttatgatgcacccaagattgatatcgccgatgtggaattcgttgagatcatgaaacagacggatcgttcatttctatgccgagcccgctggcaagacaaagactgcgtgctcaaggtagtaagcgaggaagtcatatagcgcgccttcaaatttaacatctaataggtttactagttcattccttacaaaccggatacttgcgaatcaccgttccttactagggatctttttacaaatgagagccgcgcatatagtcgattgaaggccggtggcttttgtgaacgaggatcggtacctgacttctatggggtagttgagaatattgaccctgaggcaaagagctggcaaccacagctcaagaacttctacaataaaacttttcggagggtctagatccagaggctcgcccaaatggtgtcctaatcgaatatatcccaatctaaatatgatcgatatctctaactacatagagcaaagagctcagaaactcaagcagcttctggccgagattcataaggctaagattttacactttgatccctatccccgaaatatgctgattcagggtgattctgatcgggtactctggatcgactacgaacattccgaaatttatgatccagaggactcaaagcatcccagatgttttgcatatgaaagcgaatgtatgcatcacttcatggaaaggctggtaattttatcactcctagtttgattataactttatagctgacttgcaattctagggcagagatcataagttaggggagtacaaagaaacgcggaatatgtattttgactgactcttcgcggaattttgatgccatttccagatgttgtgctgatacccaattgcatatctccgagatacctttttgatcattctccaattacttatcatggcttaatactgttgaatgccttgtttgtcctatttgataggcctcatccagctagacgagcaggaatccttctcttttcttctccgctctccgagcaactccgcaaaacatgattttaatgagcagtaaaagaaaaaggtatgcccaaggagaaaagaaaatatccttcggtgtatattgtattgagcaaaaatactgaccgacgcagggatcgaacctgcaatctcttgattcgtagtcaagcgccttgccattgggccagccggccccctaataaagtaaaggtattagtcccttgatatcaaaataaccaaatcaattaatgatagtatgaattatcagaatcactcccttccaaatcaaccaatttagggtcaggaacaatagtagcattagtagtagtggcactaagagagatatctattacgtcagatctaccaccagagttactagttttactattttaactataggatataaagacgagatagaacttaatatttttaatactttattaggtaaaaagactatatatattctttagtatattctatatcgattataactataaagagatagcttttaataacgataaatagcgctagatcgactaacgtattcggtaagtgagctgcgcgcgcaaccgagctgcgcagcccaaaacacatagtaaatacgatatattacaacttgatatctcaacaacagtggctcatagggacttgtctttatagcatagtactatatatatgatatctagtatatctagggaactttaggaaaataaatggctttataactacgatatatatatttctagcttttagggacgtaattttcggtaatatttgaaatcatggtaagatagtattctactctctttgaaattgatatatagtactaagaagtcttatcaataactatcgacaaacggggagataggatgaacatatggttgttaagatataaatgtggaatatcttgcatttactatgtgttttgggctgcgcagctcggttgcgcgcgcagctcgcttaccgaatacgttagttaactaactaactagctcgatcgatgatctatgaccaaagtcaagcaaaacacctatgactgcaacctcctatgccgatgtgaaattgcaatggtgtacttggtgaatattccagcccctgtccaggctcaactgcccccgatgcgttagtgtcgcagtgcttggccatatcaatgtcatatttgtgaagccaggttgaactgagccatggcctttgaatataggaaagctattattgaggaagatagtcttagggggagacattttctgactgaatgcgatatatctgggactttgattttgcgaccttggtgagttgtaatcaaatttcttcgtgatgagataaatatgtggatatgtctcgagtgcacttaaatactaaactatattgggtgaagttatgtgcatggcaatagctttgaggtagagcaagttcattaattctagattttatacaatgaatttctttatgctcacaaatgaaacaaagccgcctcatctacgcctcatctacgtttcattaagtttagtctcagtaactggttttcggttctcgtccacagcgaagatttgcatggactcaattactcatttggtgcaggacagataggtagaatggtgcaataatacggagtagtcatggacctaatggagagtgtgactattgagatcagtagaatgatgttccgccagaatatcaagtggtatacatgtagtttgacagccgggatagacccggggtgacagaagctcgggtgattacactatgtcatgcttagggtgtcactaagctacatctgacacagctccagataccagcacctgcttgtgtcatctaccacactaaaaaggcaaccgccactgcagcccagtgacatttacttcctgccccctattggcgcctaagacaatgtattactagcattgcttccttaactgttacaaaatgtaataaaaaccattcagtataagacacagtatcaaagtccagcaatcgcctcctgccaccgactaggcataacagactagtgatctcgacggcctaaggcctccggatagtcattgcggagtgaagtgactgattccaatttccgaggccacatagtaattagagtatagggggagaggggtaccataggccacgcagtaaacaactctcctccatacattatttatttattttcttcttcccagctcgataaccgcacggcgtctagaaccgtcagaacgctctctttctttggaatctcgataagattgatactgattggtctctcgattgctagcgcgggagcgaatagctccaaaggacgcgagtagccatatctaactatcatgtgctaaccagaattggaaatactaggtatgggatttatttgaggggagacacctcttctacggaaatgacccagatggcaaagggtattcgacctgggcgcaccttgcagaagttatgggcgttctgggaccaccccctttagatatgctgcaacgtggggaacgaagtcatgaattctttactgaagatggtaagcatccttttcttgctcgagacttcgtaaaggcttacgaagatgacgttgcagggaagtggaagcaagatatagagatcccaataggaaccagtttggaaatatcagagcagttcctcgagggaagaaataaggagatgattatggcgttcatgagagacatgcttcagtggagacctgaagataggaagacggcgaaagatctgctccaggatccgtggctgaatgatcggataggatgaagctgtgtgtctgattgccctgtcatagaatgaaaacacgcttccttcgaggagattaatcgcgccgagcactagccgtcttaccgccccataccctttctaggtatacgggtgagacggctatgtgacaatctccaggggctgaggttccaagtgtaggccggatacccgctgtagcgaaatgtcacctcactgccaactgcccccgtggcttaactgctcgtccggtgatgtcggtctgacttcgtgttgcagtagcatctcttctccacctcacgttgtaatttcatgatgtcttcgaaatattgcttgatagccttctttttcagagccacatgattgtattaggagatcgttattcagagacagcagatagcaagttggttaaagggttaggggtacggagcaccccgtatagtgctgtacctagtcacatgattgagggttcgtcgaagttcgaaccttacctacaacatagttagttcaagttcctactccttactccatactccatggtgtattgaatatactgctagtggtctgaagcattaaaatcttaccgatgcacatacctagtattttgaacaccattcgtaactactccataggatctgtatcttgattcaatccatgtcacacgtgccaggcacaatttgaaaatagaaaatagaaaagtagaattgttctcggcccagataggaaaccccgataggaggctgaatgaagacccagtcccgcgggagtggatctgacagtgcagaaaaaaaaaagataaggaacagtgtaaccttgtaattgttcaggtacaatttacatttgaagattaagatcaacacgtaaatatgacctcgatcccctattgaatatctgctcagatatattcccctattcgtagtaaactgtaggtaccgtagatagggccaatactccggcatcggtagtaagccggaacacggcgacagtcaagtcaggaagatccccggaggcatcggggaaacacggaaagcgtaaacgggaccttatctgtcgccaatcgttggctcgttcccatttcgatacgctaacccgcaaagggaaaggcttagcttacggcggagccccacttagcgccagtggcgagttggactttatctgtagccaatcagcgggccgggaatcgatcttcacctatccaattgccggtgggcgataggcatttgggggcatttgggggttctgatatcccgagaacagagaaatccaagataagcgcctgtttcttcgccgaaggtctccagaagccgaagtgcaacggtgttgagtacgcgcaagggtacctgcaggagatgataagctatctggcagtttacttgtatctagttggctatctgatttagaggttctgagtctgaaaaagatatataaagagtcgtccgcatggaatctagttccccgaaactttaggaactattccccggagtcgaactactgcatggtcccattggatcataatgtattgtccaaggtatatccctcacgggccaaagctcgaactattggcaaggcacgatccatactcccttgccacacgatgcggctgtccacgccggggatgacgaggttcctaggtgttctactggttatattgtgtcgttatactatgtgttaattattgtatacagaaatcaaatgaactgagctttgttatgtataccagaccctgacggaacattgaaacgttgaaacacgacagtatctatcgattatcccattgctattgtcacaatctctgaccacaccactgcgaaccatattttgcccagctctcgtccgattttctcctctttaccgcgccttcccacggcaataattgaagtgtttcatgattctattttagctttgttctctattcacttttatcgcgtggaatcgaattgaattgccaattgccgttattcgacggggacccactcgtgtcgatctgacttatcttgggattttgggatttttggttcgacgagttcgggtttccttatttttatatccgtggcgaaattcttctctttttaacttctggaacatccgtctttttcttcctttcgccttcacttcctactttcaccctctctcctacacctaccccatccacatccaaagcttcgagcttctgctacaatggcgttcaacgggaaagccccgtacgccccggactatgcctcctacaactggataggcgccccctccaattacgacctctcgaccaacacagacttgggcggcgattcccgtatgcgtctttcttgtctccaaacggtgtgatggttttaacatgggtcccaactaggcaccgaaaatgtcaacaaatggttccaggccggcgaccaggcctacatcctcgtggcctcggccatggtcatggtcatgatccccggtctcggctttttatactcgggattggctcgccgaaagtctgccctgagtatgatctgggcttgtatggcttcgttctcgatcgtgaccttccaatggtatttctggggttattcgcttgctttctccccgacggcgaccaacggttatatcggcaacctgcgaaacttcggtttaatgaagaccttggctgatcctagtcctggttctccactggttccaaacttactctatgcgttttatcaggtaagatcgaacatagaaccatgaatctggtttttgtttccagccgatgctgatatctactagatgcaattctgcggtgtcactgcagctatcgtcatgggagcggtcgctgaacgcggtcgccttctgcccgccatggtcttcgtcttcatctgggcgactatcgtttactgtccgctagcctgctgggtctggaacgtcaacggctgggcctacaagtacggcgtgatggattacgccggtggtggtcccgtcgaaatcggttccggtttcacagctctggcctactcgatggtcctcggtcgccgacaggaacgcatgatgctcaacttccgcccacacaacgtctccctcatcctcctcggcacagtcttcctctggttcggttggctcgggttcaacggtggatctgcctttggagctaacatgcgcgctaccatggcctcctggaacactaacctgactgccgccttcggtgccatcacctgggtcctgctcgattggcgtctggctcgcaagtggtcaatggtcggctggtgctccggtaccatctcgggactcgtagctgcgacacccgcctccggattcatctcgccctgggctagcgtcatcctcggcattgtcaccggcatcgtgtgcaattactccaccaagatcaagtactggatccgaatcgacgactctatggatgtgttggccgagcacggcatcgcaggaatcgtcggcctgatcttcaacgccttgttcggtgacgacgccatcgccggtctggacggtgtcagcaccggcaccggcgtcggcggctgggtcatccacaactacaagcagctgtacatccagatcgcctacatcgtcgcgaccgcctcgtactccttcgtcatgtccacgatcatcgcctacgccatcaacgccatcccgggcctgaacctgcgcgcctccgaggaagccgagctactcggcatggacgacgaccagctgggcgagttcgcctacgactacgtcgaggtccgccgtgactacctcgcctggaccccacagaaccacgaccagctcgccgacggccacgaggtccccgccgcgcagcgctacggcatcggcgaacacagcgagatgatgctcggtagctcgccgcgcgaggtgatgctcgagggccactcgcctaacgggcagagcagccgcggcggcagcgaaggcgacgtcggcatgcacgaaatcaagatcgcgcctgctcctcgccaggccgccgagcagaatcagaatcagaatcattccgatgctcagggtgaacctgttgtgctaaagccggtgcaagagaagacggagaactaatcagtcttacatttcacttcattctcctttctcccccttcgctttgcccaactcattcatcgtctcttctctcaatctcttttgcatgacatgcatttcgcatacgccatttttcgtttagaaagctttgattttcttcgcattttcgcttctttatctcgatatcccttgagcgtgcttcttttcttgcaaccaaaaagcctggggctttttataccatctcaaacctaccctcgattctctcaatcccgcgaatttccaccgactccacataccatccgacatttctcaccctccgttcttcccatctccacctcaaccctcaaccctctcccgctaccaaatcacatacctcaccaccttttcaatccaaatacaaccttcctgggaaaagcaacttgaattatggtctaatttggcctggcgctccattgttctaagctttttttttttatggcaatgggggatattaaactgggttctgtacggtatacaaactgcttcgttgaatgacaagggaaataataccttgctttctgtccatgttttctggtcttgcccctggaatagagcgagatagcccgatttacatttttattatctaagacttttattcacgacgtttgtataattgtagatagatggtagcttgtaaatattactaccttgcctgttactagtctaaatgcaactgtctaactagaacccgacataactaacacaaaaaataaagaattcaaaatgaaccaacgcaaaaaatgcaattatacaaaacctcttataaacaattaaagaccttcctctccctacctcctaaccatccccctaaccctaatcaaatcctccctcccaagcttctcaacaacctccgccgcaaccccacccctcctcacctcatcccactcatcctcatccatgcccataacaagcgtcatctgcacacagcgcgcaaagcactcgcgataccgatacctccccggcgcaccagccacatacccaacctcaaccgcggcgcccacaagccccgcaacatccctctcgagacgcgccgcgccgagcgcgttaatccgcgatccgtacgaccagagcctcttctccaggagccgggccaggtacgcgagcgtcacgcccaggacgcggtcgaaggcggagggcgtgagaatgcgcgcgaacggcgtgaggaggtcgttccaggcggcggtgaagcgaggcttgacgagttctttgtcgaagggggagtttggattgtcgggttccaggtttgggtttggtgtgtattcgatgtcgcggaaggagtctgcgaggattgggcgtaggcgcggtttgatcgcgttgttgaagattacttgaattccgtcggttaggaggtctgttactttgctttcgaaggttgtggagagggtttggagggtttggaggactttttgagcggtgcttgggctggggaagattgagaggaggtgcggggttgcttgtgtggtggtgtcggtgtcggtcggcttggagcctgtgttgttttgcacgattcggcggatgtagtctactcccaggtcgagattgttcatttgcactaggaaggagatgatggtttgttcggagggtggaccgccatggactgggatgcgtgggtagcactcgtcgcgcatcttacgctgggtcatgccgatgaaatcggaccctaggacgcgtgagagtgtcgggactacgtttgtcacgactgcttcttgggaggtggcgagcgactgctggatgaccttgttgacgatgtacattatgtcgtcgatggccgaggtgatgtgtggtgggtccgctttcagtggacgctgggggttcatcgtgaggcctgatggggactcgtctagctggaaggccttttccacggagcggcggaagaagaaggttgtcattgtgttgaagggggccactaggcgatcattgatcttttgggccagaggtgactctcgcaagaaggtgggaagctcaaatcgcttatcgtcatctggctcatcctccgaagactaaagaagttgttagtgctgatattgaaggggcggagatgtactcacattacatgtatcagccaggaaccgacagtacagtgaccaccgacccagcatgatagccatctcattcaacaccccgtcaatctctttcatatccacaccctcctcgtcggtggcagtgctcgcccccatggcaggggattgtgggcgaggcgggcctgttcgctgcgcggacaggaagctctgcactaagaaagtgaaagcataggatttgatatccatcaattttcgatccacatggcgctcatcgctccatgtatcaagaatgataccaccctgtacatcagcctcgacctgtagccgttcaatgacgcgtcccatcttacgggggccatagtggtgctccacgagcccgccgtggccatcaataatctgcgcaatatgttcaaacagtttggtaagcgcatttgcatagaagaacccgtccttattttgagcattcccggtagccccattgaggttcgcccgagccttggccgcgacaccctggcacacataacgaccataaacatcaagtccaacctcagagcggccaataagcgggaaaagcttgaagaagcgtgtaatcttggctccatcattctccttaaccgccttctcaaactcgcgcaggaacaacccgcacagcgactccgccgcattatccagcgtcacacttggagggtccggcacctcagccgtagggaccatttccgcagcaaacgcgccgttgacaaccgtcgccgggatctgagctgcgcggtgtaggtagctggcggctttctcccagtcctggggcgcacccatcgagcccgccacgcctagcgtacacgccttgagctcggccacctgctcgacaacttccaaggtagctttcacccgagcctgctcgagatccagtcggcggaccgcgctagagatccggtcggcggtgccggcggcttcgaagagcatcccatggctgatggagcgggttgtgctggcgtgggtgccgatgttgacgcgcatcagatccagccggcccagctcacgggagaggtctttctgggatgttactagggcatccaggcgggcagttacagacgcttcttgggtatgcaggtgggacaacgtggctttgatctcggcgacggagctggcgttgaagatgtcgggctgtgcgagaggagatgtctcttttggtgaggcattggtatttggagggcttttgggcatggaattatgcccattggcagttgcagccattctgggcgccattggtcgtcgcaagttggtttgttgatgccacgccagttgtagggggttgcgggcggtgagggcgggttttacagcctcatgattcatgttactgtgctacgtcaagaccggcggggatttatgactccagattgttaaaccaaatagaacttccatacttgcctgaacccctctttctttgtacttcagtcgccgtttcatctgcggcgtcttaatgtggttgtgattcaacgcgacgtcatttccgccccacgctcgcgattatatcagttgctcttttccagtttcctttcctttttttctgtgtaccttctctgttgatcttcttcttattgacaagtctcttggcttgacttacgtctgtcaagtcttcaaccgccatcatcggacgtcccaaacctagacgtcggaatcggcgcaccatgggcaacgaatcgtcaacccaggtggatgagtttgcacgccccttggtgcttgaggggcggaatatcgaggcggtcgccaaatatgttaaacagcacaatgtaaagaaagttgtggtgatggtatgcagcgtgaaccccatagaatactgcatgagagctaacaagcatgcaggtgggagcgggtatcagcacttcagcaggcatcccagactttcgctcacctgacacgggaatctacgccaatctggcaagtctagatctaccagagcccgaggcagtctttgatattggtttcttccggcgtaaccccaagcctttctatgcgttggcacacgagctgtacccgggacgctatcgcccgactgtcgtgcactcattcatcaaactactttacgaaaaggggatgctcctgaaacattttactcaaaacattgactgcctcgagcgcgaggcgggcgtgccaggcgacaagattatcgaggcccatggcagttttgcatcacagcgctgcattgaatgcaaggagacgttcccagacgaggagatgcaccagatggtggccaagagcaatgtaccccactgccacaaatgcaacggtctggtcaagccggacattgtgttcttcggcgaatctctgccttcggaattctttgaaagccgttctctgccagaagaggccgatctctgcattgtcatgggaaccagtctgtctgtccagccatttgccagtctgccttcgatggttagtccaggcgtgcctcgcgtgctcatcaacatggagcgtgtcggtggccttggctcgcggagtgacgatgtgttggtgattggggactgtgatgccggagtgcgcaagtttgcaaaggctctgggatgggcagaggaattggaggcgctgtgggaggaaaccaacccagatccgcagaagagggcggaggagaatgctccgctgcagacccgagacgagcggctgcaggaggaggtggaccgactcacggaggaggttgatcgaactctggggttgacagatgcgtatcagaatagagtacgcgagaagctggagtcacacgacaaggacaaggcacaccgccagtctggaggtctggaccatgttttcccgcatttggcgcgtaagctgtcacattgagattatgattcatgaaatgtctttgataggcagaaataggagattatcatttgagtattatggggtagatctagtgcagtacgtactccgtagttatgtaggacatacggggtagttatgtcgtacataacatggatagccaacgccaagagatgataatatcatcatacgtttgcggtcgagacttgatttcggtcaaataacctggaatgttctaataatctctttatatcagattaacctattttaactatagcctaagatagatctgctataaaagcaattcccccctttgccctaacttcccccaattgattttctcgtttctctccgacagtccaaaacaagacatctacagttgccccacgttatttttccatatcgtcattcttccccctccccaacttttttctttctttcatttctcttcctccataaattcatattcatattcatcatggttggacttggcccaaagcacccgccgtcccgcaagggtgaggcttgaagagctacccctgcctattttaaactaaccatgtggtacagggtccatgcacgagctgccccagaacttgctgggcaccattcaggacctcgagaaggctttcactgtggatcgcgcgaagttgaaggaggtcgtggcacacttcgccaaagagctcgagaaaggtgagcccatgatccgctccctgattctgcgcagtcgctaacaggaaaaaaattaggcttgaccgtcgagggcggcaacattgtgagaacgacatcattcccgatcccaatttagactgaccctagctaatagcccatgaatgtcacctgggtcttggacttccccgatggcaacgagcgaggaacctacctggccctcgatatgggcggcaccaacctacgtgtttgcgaaattaccttgaccgaggagaagggcgctttcgatatcacacaatccaaatataagatgcccgaggagctgcgcactggaaccgccgatgaattgtgggagtacatcgccgactgcttgcagcagttcatcgagtaccaccacgaggaaggaaacctcgccaagctgcccctcggtttcactttctcctaccccgcgactcaggagtacatcgatcacggtgttctgcagcgctggaccaagggcttcgatatcgacggtgtcgagggtcatgatgttgttccccctctggaggagatcttgaagaagcgggtatgttcatgagatgacgataccctccccctccccacgcaggttcaaagactcacaaggctacagggtcttcccatcaaagttgcagcactgattaacgataccaccggtaccctcattgcttcctcctacaccgactccgccatgaggattggctgcatcttcggtaccggcgtgaacgccgcatacatggagaacgcagggtctattcccaagctcgcctacttgaacctacccgccgacatgcccgtggccatcaactgcgaatacggagccttcgacaatgagcacgtggtcctccccctcactaaatatgatgacatcatcgatcgcgattctccccgccccggccagcaagccttcgagaagatgaccgcaggtctgtacctcggcgagatcttccgtctcgtcctaattgacctggttgacaatcaccccggtctgattttcaacggtcaggacgtctccaagctacgcaagccctacctgctcgatgcctccttcctcgcccacatcgaagaggatccctacgagaacctgacggagaccttggatctgttcgaactcaagctgaacatccgccctaccgagccggagttggagctaattcgccgtctcgccgagctgatcggtacccgtgctgctcgtctttccgcctgcggagtcgccgccatttgcactaagaagaagatcgactcctgccacgtcggtgctgacggctccgtcttcaccaagtacccccacttccaggcgcgcggtgcccaggccctgcgtgagatcctcgactgggcccccaacgagaaggacaaggtcgtcatcatggctgccgaggatggctccggtgttggcgctgccctgattgccgctctgacactcaagcgtatcaaggctggcaacctcgttggtgtccgcaacatggatgacatgaagaccctgctttgagtgggtggtcttgtaatgatggtgactatgactatcatttaacccatgacaaaacaaaccctacgtaccgattttggatatcttcttggagttggtttgtgccatttagttcgggggttttatgaaagatttaacgatatatcgattctgtgtatgttagccttagatggctcgtgaatagaacatacatagtgctattattctcgtaactatcactgtagctagtatcattgtaattctcggcttctctactcagcttcacatctcacccaagtcactaacccgaggaacagcaaggcgtagatatcaaagaagatacaatgttcagatataatcaattggcgtataaacactagaacacgacctacctacatacaagtctcacctacataacaatcgagcccatctagagccacacacctaaactcccgaatcgtcttgctcaatatcaaaagcctcatcataagcattccaagaagcacagttatcctcaagagcctggcgatcaatcaacggctcaatttcactctccctctccaaaaactgcaacgcaaaaccctcatccgtatgccagccaatatgacaatgcataagccacgccccgggattatccgtctcaaacgccataagcaaatacccattcccattcaacatcgccgtatcccttcgcggcgggttattagtcgccacactcccatcccacggattcgacccctgcgccagaacaaagaaatcatgcccgtgcatatggatcgggtgcgtgaccgggaaactcgtgttgatcataaggtacacccactcgttcgcccgcggcagctcaatcacaccgctcgactcggtgaagttgggtgtgttttcgttattgaaaagctgcagtaaggtcgggtcttcccagaggacttgcatcgtcgtgctgttgagataccagcggaagaggttcgcggtgttgcgtcccagtgtcacgtctgttaggttgttccagtctgcggcggagacggtcttggggacttgtgggattagactggaggctggctcgtcgatgcattcgtcggggaaggtgtagggccttgttgtgggcgtgtttggactgttgccgtagtagaggatgcctcttatgttgtctgggtttgcgttttcggagcatgcttcttggggaattgcacggatccagaatgagtcggagatttggcgtttgttggctgttacaattacatcgtagcgttggcctgtgtgtttttttgttagttcatgtttcttttcatttggagggatggagctggggcttgcacatacccattccgatattgatataatccgtcgtaaacggcttgatcggcacaaagtccgccgcaataacagtaagcgtatggttatcaatcataaacttccagtgcgtatcaacagccgaattaacaatcctcagccggtacgaagacccctggttgaccttcatctggaaccgcgtgcccgtagaattggtcccattaccaaagacattcgtcccgttaatcaagccagtatccaaagtcggtggccctatcgtctgagcctccaggtacagctcatcaacagtagggtgcgaccagtccgtcaggaacagactgcccttatcgacctggtagttcgccgtagcagggccattgatcacaatcccgccaaacacgccctcccatgcctgcaggccaatgtgcgaatggtaccacgatgagccgtactgcgtggcccgccatttatatgttatggttgagcctggcgcggtgggacattgcgtgatggagaccacaccgtcgttgccgttcgtgtagttctgtctgatcccgtgccagtggatgctcgtgccgttcttggcattgtgtaggctgttcgtgacgtggatcacgacctcatcgccccagtctgcgaagatcgttggacccgggatagtcccgttcacggccattactggccggctgaacccgtctggtgctgctactagctcttcgacgtcgagccagtactcctgggttacgccggtgttgggtactatctgggtgtagtcggtgttgatgtcgtattggcaccatctggaccgtgttaggggcgtgttgcccacacagggtgttcctgttggcttggtgatcttggtggttgtcgtgggtctgtggttttgtagctggacattcacagagctagctgcgttctgtggaatggccacgacagaagcgctcaggctgaatgccaggaggagaaaagcttggaggttcatagctgctgattttacccacgtagggcacttatataatgctcaattgtctttgggtcacgaatacagctctatatagagcttgcaacacacccaaaaaagacttcgagtagaagaaaatgaatgggacttgctgatacacaaccaagagaatgatctcctatttaagccgctatcttagaagtatatcacactacgaggttgttagactaagaccgaaaattccatgtctcttttcacgaggtgacctgcatactcctcactaggatatgccaggcagccctaccggcggcgatgccgtgtaaatggatcttgtgatacacaagacgacccgacagacgaataccggcgaagcatcagagtcatagtccagctcggaagttgaggctatgtgctcagtggatacctgaatagcaagagaaaggcgccccgtatccacgccaaagacagtccaccattcaaacgtaagaagatgttcaactcggggaccttcccagattctgagtgtctatcacaccacgtgcgcactggccgctttgatattgggggtgtttgatagtgccctttctctcgtaatagtacccttgagatgatggatatcccatgtaactagggctgtgtcttagattaacaaagtcaaatcttgcaaagagaaccaatgatggaggtcggtcatcgatgatattattctctagttcgatcgcagtcagattggcatgcagggccttgcattagggttatgctccccgacacgcggtcctgtttgatcccggtgtaacctgtttcagccttagtctatacgagtgtaagcatcccacgtgtgtggcttggacattaatgttgtgatctcgcatattggatgtttctttttttgagatatcagctggtttgtccaggattgtcgattgttgcgagaatcttgacgcagaatgcatgcgagtggatcgtcgatctggttgtaacagccgggatctgaatttcagcatggaacgcagcctgatgatggcaaagggggtgtttctggtttactgggatcctgcgatcgagttgcaaattacgtatcgtcagctcataccggttcaaatcacaataggaggcttggatcacactctttgaaaatagagagaagatcagcggttgagactatagagatcattggttagttcctagggtgctgcctgcttctaatcacattgttgtctcgttgaatatgccctcctgaatctgtcctgttttataagttttgcttgatcctgacacccttccaacatattgtatgacttgttcattgcaagatgctatttctttctattctcccccttctagcctttgggctagtctgctttgcgcatccacttgaaaagcgacagtcaacctcaaccgattccttcaagctgtatgcctatggcactggcattagcggactgcccgtcttctacaggaatggtatctcagccctcccagctctcaagaaaagcagtattgactgatacatatcaccttgaccacaggtactgcccaagttgcagatgtgtccaaagtagacacaaccacaatggccgcaatgaccccaatcaactgtaagaacccaagatctccacttgataccatgtgagaaccactggaattacatctaaccacgtacacgtaacagtcaccgccgccactgacaacacctgggttgcacaccccatttccagctccagtgccacggcggacttcaccaccctctctaccgataccaacatgctgtgtctagaccaaggcgatacagcggactccaacccagttggattcactggtgcatccgcggcggaccagtcgaccacaaccaagctcagtaatgtgtggtccacatatgggggctacgtcctagtcaccgtgagcggggccaacttctacgcgagacaggctgacacagacggcgtgtactctctgctttggagtagctcggctgaggcgatgactgatactataccgcttgtgctgcggactactgagcccgcgacggtatctgtattgacttagctgagcagggttgggtaggggtttggtggagttgaggggtctcgttacatagcagcaagcggtatggtgtgtggtgttgtaaggaatcgatctcggctctgcctactcggggactttgttggatacgatgttatgcagctagtaatgtgctattgtgtatcatctatttgtgttgtgttggctgcattgtgagggaggaagggggttagctagcgcttactatattatgtatggcatataggctgcattcggttccggaacatgagagtcccgtattctgtaaagtatccgatatatcaagtgtacgatcaagtgtacgggcgactaacaagtacgtagatctaatgatagagttagttatgaatcggtggcatagttagtcggctgcacaaatggagatatataactatcccgggatgtgtggtcagagcatgccagtcttgaaatcgaaaaacaatgagagccgaatgaattgacctctacagacaagtaaaactagcaaacataccaaaaaacatagattcaggaaattgctacataacctatagctgatatatgcatgagggaacgacgcggattgtctcagacaaacgagaggaatactatacgagacttattgcagaaaacgcctcgttgctgtgcgcagccaagggagagagaaagcccaacagaggattatcaagcaaagtgttggttgtgaagaggccccggcattaaaacaaagaatccagagggaataaaatggaataaagaaaaaaccctcgggggcaaagttgaaatcagacctagaaaagcaaggtaaggcagactggcaaataaaaagaacccgatgcaagcgacatttgatatcaaaagcccaaaaacaaaactccccagttctcctagacccagaaaacaccagaaataaaatgaaaacgtggtttagaaagaaaaaacaccggattcccatcccaaacccttggtaaattgacatcccgaataacaaagaaaaaaaaaagcagaacccattctacatctgccatctgtaccaaaccttctgcgagactaaacccttgttgatcgtttccgcagaccaaattcttgttcctggagctctcgtatcaaacgaagactttcttcgtctgcatcctcgtctccagtgatatgctgagtatgcctgtgctgacgcggagagagtgacgtagggccttgacgatggaagtgcttttcatacatcggagagctcttcttcgcgtgtgaagaagagggacgtgatgaaggctttcttgtcgacgctggaacaggagtggtcttgcgggccccgatggtcgaagacgtggctcgtgctgcttgtttcggagcccgggctgtatttgcatcgggcgcgaaccgatcgacgtgtcgaggttggcgagacgagtgtcgagagctagagttgggtgtgtggagagcagttgacacttccccttcaacagactgcacggcatctccctcttgaaccccatccatctcgtcgaccagcgacgtgggcggtgacaccaaagaggtgtttggcttggatgaagacacagacatagaatttaagtcctttgcttccacaggctcggcctggaaagcaggtggtgatgcgtataaagcttgattttgaggtgcctcggccgccttaggcagatgcttatcaatttgattgaaaggctcgtggtcataggtatccatcaggtcgccttgcaccatcatttcgtctccatcatgatcaaagaatactgcaggctgtgtcatgggcgatgtgctctcctgcttcgcctttttggctgaggcgggcatgtcaccctcttcagcagggcgtgctcgtttggcggaagcattcgcacgaggtttagaacgctcttgggccttgatcggatctatccgaccgtactcatcgtggatgcaacggcgctagtattgggttagtaaaagataaaaggagtaaaagaagtatcaaggggtacgacaaaccttgctcttccgacaatcatcgcacgccttgctgcgtccctttttccctccgttggttccgtcggggctcacatcaatgagacgattggcggctatcgtggagttgcccatgaccgcggattggaatctggccgagctctcgaatcgttccaggtcaacaagatgcccattgttctgaaactccgtttgtgacgcaatcgctgccaaagaattcaaagcagatacagcatcctgggccaatgacgatggcgtgctcactccagagccggctgtgaatgtattggttgcgacttgcccgttgagcaccagatcaccgggttcatctttgtgtcggcatcgaatgcgtcgcttgcgacaggcgtcacatgcaactcgcttgggaccaagacctgaggctcgttgtacggctcggggcttgggtgtagcaatatctttaatgctcgtttccaaaacaacactgaatggcgccggcgttgcacttccatcagactgcgcataagcaaggctgctggctgggggattgggagttgcaggggcctcttctgaaggccactggacagcttgtctttcggcatatgtgcgttggttatcgacattgcgttcggatcggcggctgggtcgtcctgcgggcttcttgtctgcaatagaaaccttgggattgctttcgatgacgccgggtcgagtccagaggggtgccttttcgttaccacgtttccaggcgacccaaattccgaattttctgatcatatccacgggatctcccgtacctttggggatagagcgtttgaccgcgtttcgaatgtccacggagaggactccatcgacagtatagccacccgcaatgagtgcagtccgaagcaaatacttagttaactcaagtaagccctccagttccgcctgtgagtaaaaacgtgcattgtgatggggagaacctggaggttcctggttggcgcgttcgccaaactcgtaataaattgggtattgacggtggaaccgatagttctcatcctgcatgaatgcttccatcacattctgcgggacggggtcatcctccaggtatttttgagccgtataccactggatcttttggaagaaagggtaacggaacttcttgggaactttggtctctttctcgatgttgagaatcttgatttgcatcccgtagttcaacttggtcaagaagttgccgccaataaccaaactgttttccggggtccagactgcgtgaatccaaccggacgggatcaacatggtgtctccctcggagagatccacacggtagcactccttggtctggtttccaaggaaaatcgagtcctgggcaggagagttgcaccactcctcgtacttcttgaggtgtttgtctttgggaggaataaagaagaaagtcttcttgcccttcaggatatggtagtacactgaagatcccccaaagtcgatgtgaaagtcggtatagcaatcggcaacagacatcaggcagtagaactgaactttgggatattcgccaattgccttcagttcctctggccacacggcatcttgcagatccaagtcacgcacaaccttcggtcgccggataagtctgccaagtttgctctgcgatacctccagactgataacattcctgacaggcttgtccgactcattactttcgtaataatcggcccatttctgcatgttccacctcttgtcctctccttgctgagacttgacatcgatcacttcaaccctttcttcgggtccgtaaagctctgccacagcacggacagtgagacccttcggaatgaccatacctaagaggtcttgaccacaatcgactgtttcttcaatatgactcgcttgttctgggtggttctcgagaagatcatcaaacatctcttgagaacaagcctcttgtaccaaagactcgaactctggattctccgaggaaataggttcggaagagttccagcaggcaggtatcacaataggctccgtccacccgttacctcgctcgaagtattccgctgtgaccagctcaggtttcattcggggaaaattctcaggttgaaatcggatctttccttgccgaataggctcgagatagtgatgttccaacgagtcagtagcagctttgactagaccttgattcaggcctgcgtagtcaatagctgtccgggcccgcgaggacttgcgcacaaaagttgtttggccatgaactgatcgacaatgccgacaaataaacttgtcgactgtgcgaacctcacgatcattcttgaagccggcgcaaacgatgtggaaccagtgtttgcatccatcgcaactgatccacgtgtcttcgtcctgttcctcggtctcaactgggatgcgcactagatgacatgccccacatcttgcttgactggtatcaccctcttcctcttccacttttggtggaatggatagggtcttcggcgggaattgaggttcttgaagatcggccggaggatggatcccataaggagtagggtgaggcgtatcgattggggaatgccaggctttgccctcctgttcatcctcccagacaattggcggaaaattgccagagctagtggttgggcgaattccacggatcgcaggacgggatatgaaggctgacccgtcagaccgagagcgcatgcgggcatgaggaatatcctcagaattgtgatccatcttggaattgctctggtccacatgtccaacagcagcaaacccaactcgagattgacgaattgcgtcgcctgtgtagtggtggtaggtctcgtcgatgctgactcgtttagtgtggttgccggggcggaaattagtaggccgcgcgagattgagtaagagctctgcatcggttgtcatgctttccactccagctgaatgtgggttttctgccagcatccctagctgcgggtgatagggcgacggattcctcaccgaccgtgcccgcttcgccggtcgttcagactctgcggggtcgggtggaaataagggaatcgccgactgaagggttggggaaggcgggttgggagggagtgatgtgaaggtaggactcgtcgcgagggcgatcgtcgcaagtgtgtcgatagtcgagcttgagcggccatggcctgaccgctggtgtgaaacaccttctgcggcgacatgtcgatcgtgattagaagaaagctgatcgcgatcaagactggcagctcgagcagggccgcggctgccccaagaggagtgaaaatcggtcgttgtggatggagtgataggctcgacagcgcgtaaaggaggggacggagtacggtattgcggcgggcggccgccgctgggggttgcgggtgnnnnnnnnnnnnnnnnnnnnnnnnnnnnnnnnnnnnnnnnnnnnnnnnnnnnnnnnnnnnnnnnnnnnnnnnnnnnnnnnnnnnnnnnnnnnnnnnnnnnnnnnnnnnnnnnnnnnnnnnnnnnnnnnnnnnnnnnnnnnnnnnnnnnnnnnnnnnnnnnnnnnnnnnnnnnnnnnnnnnnnnnnnnnnnnnnnnnnnnnnggggggggggcggccgccgatgggattcgcgaatgatgccgcgctcatcattttcgcaacccggtgagagtgtagattaaagaaatttaaagatgaagggagtggtgaaaagatgcgctgcggtaggtgggtgcaaagcggggatactggaccacacgggctagcgagaggccggcgcaggcgaatggaatgtcattcctggcaggaaagcatgcgcaaaacggaccgcaagtatatgattgatgtttgatgaatgattgagggagaatcaggtggtcgacggtggtcgcggagcgttgagggggttcgaatcgagcggcgggaggacaaaggcgccgagagtcgcgccgcaacctgcgggcaggtagggaagggagtcgaatgaggtccagtggccaggaatcgtttcctgccaaccggatgggaagttataattatgcgaatggatgaagcgccgagagcgagagagaagcggatgagcgcgaggtgttgaggcaaaggaggaagcgggagtcgagcagtacttggaggtatgtatacggtacagctgcggtctcctacattacgttgtctcctgccatcacatttactagaaaagattgatcttgcatatatataatatcaagatcaagaaacgctcattacaacatgcgattgtgtctacttggttgattccccccgttgctcctttctctgtagtccaaatgaagttggcgacgccgagagcgtccgtcttgataatacagtttcataccatcacgataccgtcacgtggtaagtatgggtagatcaccgcactcattgcggtcacatgacccggtcacatacggttcaagaaccaactgccactagaccaggataagtaagcgcaccgccaagccaaacctcgtggttgtccttgcgacttgctcggatcttctgtctcttcgctattccaacactgcaactgataccttgcgtatcttcttgtcaacactttcattcgacatcttctaggactttctcgtctctgagaatgagccgaaagctcgcccccgaagccaatcggtacgtgagaattactttttccatgcccctcccggattctcagcacaagtgccatttcgccatcaacagcttgatcgttgggtcgagcagatccctgacatttggaagtgactcgcgctaacctcttttttctcttttttacaggattctcttcgtcaagaacctcaagtatgtacctgatcattccgctgcttggctccggctcgattctccggcagatcagccgtgcagctccccatttacaatcgcgatcagatcgctgacatctttctcaaaagctacaacgtaacggcagagcaacttttcgacctgtttggcaaatttggtcccattcggtaatgtcacccatggtcgcgtgcgtttgaacccgatctaataccatttcatctacagtcaaattcgccagggtatcgccaataactccaagggaaccgcatttgttgtctacgaagacgtccatgacgcaaagcaggcatgcgataaactaaatggcttcaatttccaaaacagatatttggtcggtacgtgttgcatatggatctaatgagcgtccagaattattggaagatgactaactttggatgttatagtcctctatcaccagccagagaagatggtgcggacgaaagaggatattacggaaagacaagagaacttagagaggctgaaacaacaacatgggatagaatgatgtgacgaattctttttctcttccctctgcaagcatttagctgcgcgtggtattgccatgcctttactattcaatcgcggcttggttgaggggtttccggcgtttttattccctgggtttttttcttcttctttcagagggtttgatggtgggcgaggctggttctggtcgtcatatattgacccagatatgatcgtgcgaacagcacgccggcgagatctgatttcttcttatgtttattctattcaaccattactactattaccccctttgtcaattcgaccctccaatttgctccaccattgtctatgctatggctagatgctaggtgaaagggttttttgcgaatgctatattactggaagtgatgaattatacgagtgtagagctgttttcgagcttcgttggatctcagaatgtcaagctaagggtctgtctacctaagggtgccacatcactgctcagtacccactattctgcaggggtatttgaagcttggcatcgacttaagacatatacaaaccataccaagatcaagatcaaagcagatagcgaaataaagagatgccaagaccaaagacccttaaaatagccgtattgccatgcagaccctgaaagggaagtgctatcttgtcgatcccgcggggaccctgacaccgcctaggggcagtctcacttgaccctgatcctttttgttcttttccagaacctctttttttctacactcctcacaaagaactggtttttataagttcaggcttatttctactcatccgctgacccgatttattgccactcatttcgatgtcacgcatatgacgtccggctatctccgcctctgacaaaccttccaaggttactaagtgcttcctacgatctggtttccagcatatgtcgcgttccatctgaaatttctcactgttcttctggttttcccagactgaaaaaggatggacggtacgaccggctcgttggcttcgatagctacaaccacgcttattgctgctagctccctagccattccaacaccctcgggtgcacacacactatattatgatgcaacgaattcttcaagcccaggccaggatcctaatggcgaaggaggagaatgcaagctacttggtcccttctctgtgtttgttcagattgctcttggcagcctcgcattattatctctagtctataagagatggagagaacgaccgcagcgcccggtgaagatatgggcctttgacgtctcaaagcaagtcttcggatcggtgatgcttcacatgttaaacctggtcatgtcgttgttttcggcaggccaactggagattcgaagctcatacaagccgaacccatgctcattttacttactgaacctgggaatcgacgtgcgttccttctgatcttgttttgacttcttttgaggagctgctggctaactgatagacagactacactcggtatccccattctgatcctccttctccacgttctcaatcgcttggcatcctacacacctcttgcaaaccccccagaatctatagagtcaggaaattatggccagcctccacgcataacatggtggctcaaacaggccatcgtttacttcatgggattactcggcatgaagatatgcgtgttcttcctcatcgagctcttgcctttcatcgtcactatcggcgactgggctctaaggtggacagaaggccacgctgctgtccagatcttcttcgtcatgctgcttttcccagtcatcatgaacgccatacagtattatatcatcgatatattcatcaagaaaccagtgtcacaatacgtggtggatgacacagttggagattttaccatagatgatgatgctcatcgccgggaggctcttcttgctggccaggatgagtcggattcagctgattcggatgatgaagaagctgggaaatctccgagaacaacctcgcagccgaaggctactgcagacgctctccagggagaacgtttacttcccgaggatgacaatcctgttcctccatatgaacctccgagctcgagtggcagtggcgaggaacgttacctgaaagctagttcaacacagcactgaatgttgctttgcgttcttgctttggaagtttcatatttgctttgttttggtgttcatggttatctttaacgtgtatacgattacttcgttcttgcatattagtatgatttttctcattttcctgctatctaatgtgcatatatctaggttgtgcctaggtgtacttggataacatggaactgttactcgtattcctcgttatagtcagaatcaacctatccagagcgacattgaactacatggaatatctcttattctatctacttgcctatcttcccccttctatgttagcctttttactctcatcaagttcatttaactagaggactcaaggatgtcaaatgagtctatagctgtgcatggcctcggattctggtttgttgccgcaaaattaaggcaacagtatatgccgccttccacaccgctttgatctgcccattctggaaaaatcaaagaagaaaaatattcaagctccgcctgaggaagatttgcagcctacaattgcattattgcattcgagtataaattcggtgaccgagtctgcaagaagttgtgcttgattggcagatatcctcacaccaattaccatgcctaacgtagggctaaaaggaaagtccaagcggacgaccaccgggtctccgttcgagaacactacggccaatatccgcccggaggactcagatgtcgagatgggcgacgaaacgagctcagatgaggacgatgtgcccgagaaagatgaggcagagaagaagctagagcgtctgctttttggcgacgatgaggggttcatgggcgcattgaagagccagcaggaccgcgaggccggtatggctctcacactgcacagtgatgatgagagcgatgctagcgaagacggggaggaaggcgagggccgggatttggctgctctggccgactcagacgtatgcgactccaccccaatgcgttcgcagatcgagggcttttgatctaacaattctgctttcatctagcttttcttccttgactccggtgcaccccctaccacagatttcatcggatcaccggaaaccccgtcggacgccgaggacgacgaagaagaggacgaacccgcggtctggtacgacagcgatgacgagcgcctcgccgtgtcgctagcaagccaagccaggctgcgcaaactgcgcaacaccgaagccgaagatgtagtcaacggcaaggaatacgcccgacgactgcgaagacagttcacacgcctgcatcctacaccagagtgggcgacgccggagctcaagcgccgcaagacggactcggacgcagacagcgaggaggaaatcaactcggacgacgagaacgagaacctctctgtgcagcctctagccaagctcctccaaaacgcctccgacctgacgcgcatagaagacaatgcgcgcggcggaaagcgcaagctgcgccaggaagtcatcgacatccagagactaaaggacatcggcaaatcccaaccctcctccgtcgactccctgtccttccacccgcactacccactcctgctctcctccggaccagcctccaccctcttcctgcaccacatttctccctccgcacccgcgcccaaccccctcctcacctccctccacatcaagcacacacccatccacacgtccgccttcgccgcacccacaggcaacaaaatcttcgcctccggccgccggcgctatttccacatctgggacctggacacgggcaaagtcgacaaagtcaacggctcctccgaccgcaaggaagagcaaaagtccatggagcgcttcaagctctccccgtgtggccgcttcgtcggcctagtcggcacagcccgcaagggcggcggtctgatcaacgtgctagacgccaacaccgcgcagtggatcgcccaggtgcgcgtcgacggccgcggcggcgtcgcagacttcgcctggtggtccgacggcgagggcatgaccgtcgtgtcgaagaacggtgaggtctctgagtgggacggacgtgtcggccgtgtcgtggcgcgctgggtcgatgccggtgcagtcggcacgacggttctcagccttggtggtcgctcgggccggacgcagctgggtggtgatcggtgggtggcgattggttcttcgagcggtattgtcaacgtgtatgatcgtcgcgaatgggcggctgcgtatgcgaaggcttcggctgctgagaaggattccaccgctcaggctggtatcccgcgtaaccctgacccggtgcgtgtgcttgatcagctcactacacccattagccatttggtgtttgcgcctgatgggcagatgatggttatggcgagtcggtggaagcgtgatgctttgcgtcttggtatgttttctggctctgcttgtgggttgtgttttgtgtgttcttgctaaccttgtttcttttatagttcaccttcctacctgcacggtataccgtaactggcctacttccaatacgccattgggtcgcatttcctcggtggctatttcaccgaactcggagcagttggctgttggtaatgagcaaggtggcattcggctttgggagattcggggatagagggcccgtctgaataaaatatttatgttttcttgtcatatatttactaccccgatagtggcacatgcttttcgttttgttgtatagtcgccggtaaatcgacgtggtctccgggtataaagttagggctaagtccatgacctaaatccaaggcatccatccaatgactgattctacttctgttcacgggcgcatgattaaaaggaagctaaggtaatacctcagggtttgacaaagtatgcgcgcaatattactttcgtagtagaccattcattttttaaagtcatagctgtctagcgagaaacaaaaacgcagaacgcccagtatccaaagagtagagtaggaattaagccattatacacgccatagcacatgcaagccgtgtcaaattaaatgaagggtcatggtctcattcgtgcgaatgagggagggatctatactgttggccttggacaaggattttcagtaacaaaagggtatctgggggaaacattcaagggaaaaaaagaggaaggaaaaaagtaaatagttagcaagacatccccggggtgcttggctaaatttaggctgggtataaattggatctttcgaagattccgacggggaaagagggggcatgggcagataattcgtaaccgtgatcgatgagggcttgaatggatgccacgaaaggctactctcccggtctgcttgcgccccaccgcttgggtcgcttgccttgctcgacatagttcttgacgacacagggggaacgatcgggtccttgacacaccttgtgacggttgaggtgtttgaacttcgggccaataggtccgttcacgaaatggtattggcctgcaaatcgatactgacggggatcacttagtgggtagaacttgtcaccccagtggcccctgtaatggaaccattccgttggcgcagagggggtgaatgtggacgcccgcaaatgttcgttgtcaaagtcatatgtgtaggcttgcgagttgaggagaggatcccatagtggaccgcgatcagttacatcgtgcagcattccccagggaagaaggtaatcgtgcactccggccgtggcatacatggcatgactgccctcggcagagtagatgacgggctggcaaggtatattagtaaggttatccttgccgcttgtgtaattgggaactcactcgttgtccgatcttctcaacggcttcgtagctataagcctctccgccctggtgggcgctgaagaagagcgctttcgggttgccattgtggaatcgcaccagacaatgctcccagtcgccaacgtgattgccaaaccggacgttggcgacagtgttaccgaggttgaagctataaaagtagaaccagaacgcatcgacaattccgttgcccttgtccatcaccaccaggattgcaggggcatcgcttcgaccaccggcagcatcctggtggatctcctctccaccgtaacgtcgtcggatctcttctctgagtatttcctgagcttcagaatgttcgtcggcgtccgattcggcagcttcttgttgcaattggtaataatcataccacttggcgcgatcttcctccgtgtcgccagggatatcaccgtcgactcgaccatcccaatcagcccaggattcttctttatcgtccccatctgcttgcgggatattcttatcgccttccagccagtgtggacgcgtctgcgcatcgtcattgctcgtcaaaaaaacgtgccgtgggccccactggttcaactcatccagatcggccagcgtcggatggtcccattgggcttgaatcggggtgtaattcagggtcggagtggtgtggtacaagtgctctgcgatatcccccggccagaattgctcaccggaataaaggtgaacgagtggggcatagtggaaaacgtagtccgggatctgccgccgagcccgctcctcggcatcccactcggagtcactagcgccgctaagccagaaagaccgccatggtgcctctggctcggcatcttgcgctttcacccactgcgccggatcgcgatgtccaaatgcgccgtgaacggtttgtatatgggcggcgccgcagacgcccagccaccggcaggatttgcggtcgaaccacgagcgcgagctcgcaatccagctccgctcctcctcgtcctcggtagaccagacaaaagcgcccggccggaggatgtgtattaagctgttgatagacacatacgctatcagagtcgagagcacgccaatggttgccttggccttccgggtcatctgctggagcgagtcgacatagactgtcaaagtagaagaactatgtggggtatgttcatagactgcgagttcgggaattccagtcgaggctagcggttcaatgcagtgggattcaagtgatagggctgcagcgggtgggcattccccagggactatagtgggacgagagataacaaaagttgagacaaggagggcgcacaacagggccgtggggatacctatataaaaacacacggtccctttgttagcgagcccgagaatttcccgactaagaagacaagaaggtaaaggaagaaaaatggcataggatgatccaatatcgcgagctagtcagaccgggaacctgcggaaatgggtcgaaatcatagccaagccggatgccatataccgagtacatgagcttatccgtcgaaagccggagcggaagggacgggaacttacgaagaaatgatcccattgctcccaagcgtgcagagtggaaaacgtggaagttgtttaagttgattaaaaggcgttgcggtgagatgtgggctttttcataaggctgaagccaaaggtctgggcacaactctcctcccagataagactgtataatgatcctggatacacagccctaatgtgacccttcataatgcattgtgctcgagaataaaatgactcaattgtccacgaaatcccctccatctgaaacatgaaaacataaaaatatgcgcatgttcaggccgttttcgccaccaggtcccataatattctgttgatttcgtcccaatcgggcaggagggggaaaaccttggagggttcaccgcttgcagaaaaagctgactcagattctatcttatctccacttgacagaccaccgggcgcatccagaccttccaattcgtcattgatttgtcgatatacaatggtggactccgaatccgatggagaatacgagtatgaatatggcacggagacggaagtgagaatcatgagcccggtctgctctcaatggtactaatcatttgacagagcttttatctcaacctagacctgaccgcccaccatggtccagtgcgccctccacgccgtcgcgcaaaggatacagggtccctggaggatagccaaaaccctgcagaggacatgagccaagcctttccgagcgaagcttatcatccgatcgagagcgccgagacaggcagtctcccgaacgagcggatccaaattctcgacctccacacgagcaacccgatcatttcatactacaatcaaatgttcagttgctcctgggctgatcaaatcggcactgagctagtttttgtccgtccgggcacggagacagacaaccacttccctcaaccgctacaccgtggagccaactacgagcttgtagccgccaacagcgtgaagatccttggccggaaggcacagctcgtccccagtgctgggccaggaccagttcaaggctctactgaggggccctcaagcacaggacctaccgcggagtccgcgtcttctcagggcgctgaacccctcggcgtcccccgtcgccccgcagcgccatctcaccaggcgcagtttctccacaggttgcagcagatcaaaactgccaagggagaaaccgataccgttcgcacggtcatgagtacacgtcggaatgtgaatatgacggatagacagcaagggtgggcccggaccgaggcgcaacttgccgaaatcgagcggctcaacgaacgggctttgagaggagacttggaggccaaggcgactctcgagctgctgattcaagagctcaatcctgacgaggtcgaggcagagtctgagtccgactcggacttgacgtctgacagcgatgagcttacttcatgaattgcaaatcgacaatgtgctgatattgggtctagctgtgtctgtgaatcatccggagcctgaacagctacctgatgtcggtatctcagtggacctacgttgtagtacatagccgaattgtcccgccggaaaccgcggaatagcgccagcgaggagatattgatctcctcgcgggaagcaaaaaccctactcccgtgatggagacacagctgaccctcttctctgtgatatcggaggaatggcatcacaacggtcaacccgggacatcctagcaaagccatcaccggtgacaagccccacccagctcgaccgagcaaacagcccatcggtggagccatctcagctacgctaaaataggtggatctactccgtagagcagtaacgtcattcacaaacttaatgtaggaatgacatcccttgttccatttaaaattactgatcacgcaaaccatctgtgaacgataaacaatgatagaaacatagattgcgcgaaccaattgtatcctgtatctgccccgttcgacatctagaacatgtgcatagagcacagagcaggttgtgcgactccattaacttccacaatgctagactggtgacgtcgtgatcggcatgatcttcacatgcacaagtagatgggccgttactcgcatcggacgacaggttcctagctgtgtatcttgtatcatgtacaacatagtggctactccccatcgccggcgcacggaactactgttctagacaccttctccgactttccgaggtaaagtgcgattaccggacagcctaggttagattttagaagaattaactagttagaaaaagcttagttgtaatgaaggaattatgttgcaatgaagctagtgtctacaaagcaaatgtatacactggacaatatataatagtaagaaaagatgtcgagtacatatccatattaagggtatacaggcacataatgaaataagaaaatacccaattgatttctgattcggaaagcccagggaaaaaaaaaacaattataacaccaattccccagacttttgaaaagcgctccaatgcgcaaaaccagaaccagataataaatgcccgccaataaacacgctaaatccaagaggcgacatgtaaaaagaaagacaaagacaaagacccaaagagaaagacataaggctaataagcatcgcggatatgaagtcgaagaacgagtagtaaaaaggaaaaaggaaagaaagagaacaacggacaggacggggcgaatctgcccaacagtgccatgcacgcaagaccattatcgggaatattagatgatggtacaatgatttctcctgagaaggtcgagaaggaagaagaagatgtatcgaagaaagatgaaagatgaaggatggtatgatcgaaagccgaaaccgagaaaggagaaaaaggtgaaatcactccaggtttaggctggggatatcattgtaggaagccgtgcccttggagaaggcgacgggcgatgggggaggcgcggggggcatgccgtcgatgaggatcgagcgggtcttctctgccctttgggttgaggctgtcatgatggcgcgggagatgtcttgagacatggagaaggaaggtggcatgaccggggtggcggatttggttgcgacggaggccattgttgtggatgtatagggtttggtttgttttggtgtagagagatgatttagacttgaggttcaagtgttttaggtagggtgaagatggactgttcgtttcggtttacacttgggaaagtatggggtagccagataagcaatgtagatgggctgaggttcgagagtaaatgtcagcttctgttgcagagtgcttgtgctttgtaggctatagatggactttgcggctccgatgttgcccgagtccggccccggtcccgggggatcgggtgtgatgtggcaagaagtgacgggagttaaacttacaaggagaaaaggaatcgggttcggctatttgcgagatgtaatagtaacagtaagagtagaagtggtgaggtggtggttgagattatagatttcttggagatgtgaagaggctgaacttgagtattgcaggtatagtatgctccgtagaagactcgaagacaataagagcgaaggtgatagcaaagctgttgacagtgctgggtataataatcgtaaaggtgagtgagcagagaaaaggagcaagacgatttcagggtcaaggagtcgtttatatttttccccttctcattaaaaaataatataaaaaaagaaatgagacacccaaaacagacatccccgtaaagtgtggaggagtacattccctggggaagcacgaaagtacccagtacatacacgcatacctggccaggcctgatgcttactccctagagatctgccatgtcgattcgcctcattctaaacagcccaataacccagttatcgaggtagggggacattcatcggaataacgggagccaaacccggaaacaagaaaaaacaaaggagataggcctgacgcgttagtgtggggaagaaactaggggatgagaatcgatgaatcaaccatttgatacctggttatttcatatgtatgtcctctgtatgtattgcgttattgacattgtccattgtctggtgggaactactccgtagcgaaagccggttgaaccggttgaaccggcaaagctctttacagaactaaaaactagtgctacttaagcgttgttttctatgattctagcactccgtacaccttctagcgttgcccggagaaaactcgctttcagacctcggcacgagagcggagacgacgatcctttcgagaacaaataccgtggcccagcgaccagattgccggggttatggaagggggtttccccgttgcggtgtaggagatcggctccagggtggcgacaggaatcggagctattatttaatagacctgcaatatccatggatgtatacatccggggaaaaggtgtgatcggatatgtatggagttcaacaactgattttcaccgtctattggaaatacgccaatcaggatttttgttctattttgacgtgctcatcaattcccaaggtgcattgtcaatcaggatgatccttcaaaaattgagacgttgagctggatatgataaaaggggctcaagtaccggtatacccacctatagtttaactccacatccgtctgataaaacaacacttgtatggaatagtatattgtacagcgccacagatagacctgtaatagtttgggagtatacttcgctaggggccgaaacgtctggggcacagatcaaggttgtttgagatgtgttgattttgacgtacggagtactccgtactccgttctccgatgccaaaggcttcagcaattcctgattcacagccaccttggtaaattcaggggcataaacgttgagctgcaaaagtaccaaaatccctttgacccgttctaccgccgatcgacgcgaataggggactccacaattcttcttccccggattcaaggggcgagtacggagtacggagtacatacggagtagtgactatttaatatgcactccactgccacatattctcacaatgtgacgttatctgggcaaggaagagtgttactctcagtcgtagaatcagaatgtccattcctgatttcttgatttcctgggtaccgggtctccgacggtgaggctgggcgtgttcgggaatctcgaaacccctttgatcgcggacttcccgtggtatctgctataataatagcaacactatattactacatcatatcgtatcggcaaattccatatgtctgatatacttgcatatggaggcgcaccatgtatcccaaagatttagataacattcttttcgcgacgtaagataaggtctcggcctggtgacttggcctgttcaccgctcgttgagaggtacttgtgatttcaatgatagattgtagcgatctgacaaagaggggaaatgacgagttggctgcccagtgtgttgtgagatacaccattttcgacatttgtggtgccaactgtgggatggattcgtcaggggcaatatgtacaacacatcctatgcatgattatgagctgacgtgatcgtgggctgctcgttagttattcggactacttgagcataagaccaatgttggtctacccaataccgcagttaccgacagatgggatatccttgtaggcgccagacgtataagagagacactcttggactcacctataatagtaccccggcgtactcgcggacccctccagccaaacaggataaggcgaaggcagggctgatttgctcgatacgcaggggatgttccgatcggaaaagatcgagaccctctgaaaggtgcccgattcacagggcactgacgaattgttgagtttggaatcgcgttctatcctggcccttgcacgtcttcgaagatctctaattataaccccttgggcttgtacccaagatcgatcttctaggaacgagagccctttatctgcaactctgaactctatgccacttccaaccttgcagagaatatgctttcaacgacgcgacctgactatcttcgagatgatcttctgacctgctggtcccgtgccgtgtcctgtcttgggacttgactcacaaggttctccctaaatgccaacacttgggaaatatatacagagagctgtgaagtggcagctgagctcgtgtcggatggtgacaccaatcaggcatccgcaggccgtgagaaaaacggggaaccagctgtatgtgtcagacgaactaggagaacccgtgaataagtatgttgtacggagtaaatgaagagaccttggggatcggaagaccatccgagcgggatctccccagactcgagaaatctagatcaatgccctgaggctattttacgtcacggggcggaatatcatttcccctagaggacagcaattacttcatctctcggtggacggcgggctcttccaatcgcaagcgcgccgagagtccgccatcacgtaaacgccccgccaggaaattctggagatgcgtaaaagaaatgcaattgatgtagttgttggggtaaagacgtgccaatgcgtcttttctaacgaatgacagggtgaagctacgagcgtggtagaagatgttgatgtttaccccgcaagtcatccaggtaccagccctggagagcccctccggttggagatatgacatacacatgtaacatgggagatattgatagtctatcaccggctttcttccaaggttgtcaccggcccggcgacattcgcaaagattgcctcaaattgcaattggccttgcctcaactggtcaaacacggcaaactcctcttcaatggcgaaaatcccccggaccgaaacagccaccagtggagctgaaagagagtagggcagtcgatcacgatgcgatctggagcagcgccattcgggctggaacacggagaatgaggcatttagcaacccaaaaaaaaaaactcggaagtttcttatcctagggtgggttcatgacacattgcattccacgatgttcggcagcgatcacatcattccctgtatacatcatccatgcaccctattaagacatctcaggtgaccccccgtggacctgctactatgctcttttcagcttccagcaagtctcttccaggtcacccgctcacctctttttacccctgttcctgtcctcagccacgttccagactgttgaggcaattcttttcgtctcatatcggcccgcatgacgcagcgggattttgctatcggcttgagttcggaaggaggggcgatgagctccaatcagcggagaatgtatcgccggctgttagtcaaagtggagagagaatgatcgttttggggtggaacaaagtggaccggcggatcttaatcagcttcgagacctctatacggttgaacctccccgcctattatcggttataactggtgggagcgggacgtaataataatagaataactaatggaaataagagagtatgtattaatagagacagagataatagggcttactagggattagccagggacgaatagagcagcactagtaaaagctgagaatcaggttttgttgtgtataaaagactagggttccccggattttctgaatccttctgattcccatccattctcatttctcaccttcagtccatggcgacgattggtgatcattgtatttgccagtaagtcttacagcgtttcttgtcctccttgcttgttatcttcgacctaccgagataagcacattctttgtgtcgccttatctcatctcacacgtgccagatgattcatctgagctcatgctgattgccttatagcttctgtcatcttctcgctcttacgtgttaagagatctgcctcacatactgcatcatgtcgtctccagtaactaccccactgtcggagactcccaatggcactggcgcgagcttgcctaatcgcccccagcctaagctttttggaagccaggatggaagctccggctccggcacccccatcggtttccagcgctttcctccccacaacaagcacctagatcatgccgttggaaacgctttgcgacaaccgtccccgcagcccacgcacttggggatccccggtaccccgcaccgtgtgctctccgaggaggacccgggctacattgcggctacctttgagggcaagcagaaacagatggaacaaggtcagtggggttgacaaatgtggggataatgcaattagctaattcccagcagttatggacatcttggaggagaagggcttcttccccagtgactttgtcatctccgaaaccacctggttctataacaagcttggcatcgacgatacctacttccagaccgagtctgtggatgccatcgtgacccagatcctatccctctacgccgccaaagtcgccgcctatgcccgcgatgataagcagctggagattcgtctggataaagaggccgaggaccatgcggtctacatcgataccagcaggcccggtgcggtttcggtcgatggtccacgctacgagcagcgcatcgacgagaagtacgtcaaccactccaaaggtgccaacagctaccgcgtggagaccttccgctcgccgagcactctgccgggcgacaacggccagcagctccgctgctacttcgtgtacaagtgccagttcgccaaccccaacccctcaccgaatgagaccaacatcgatatcattggcgagaagcgcttcttgcaaaaggccactcccaacaccaaggcgatctaccaggaaatcatcgccacggccgttggtcgctccggtcctgtgattgagatgttcgagattgagggaagccgggaaaagcgtctggtgattgcataccgccagggatccgctctgggcttgttcagtgccctgtcggacctgtatcactactaccgcttgaccagctcgcgcaagtacctggagaacttctccaacggaatcactgtgatttcgctctacctgcgtccctcggacaagtccgaaatctccgccaaattccctcccattgaggctgccatccaccagatcatgaaggaggtctcactcttatactgtatccctcagaaccgcttccagagccactttgccactggtcgtctgagcttgcaggagacaatctacgcccactgcgcgtgggtgttcgtacagcagttccttaaccgtctcggttcagaatacacttcgttggccgctcttttggatagcaacaacagtgttcacgcagagttgctctccaagatcaaaaagcgtctgcgtacggagacattcaccgctgactacatcttcgaaattatcaacaaataccccgagctgatccacaagctctacctcgacttcgccaacacccactacgttcagacccaggagtctggtgatgacttcctccccaccctcagttacctgcgtctgcaggtcgacgaggtcctcgatggcgccaagctgaagcagctcatccgtggcaccgcccacaacgagcacgacgagatggttatgacctccttccgcgtgttcaactcctccatcctcaagaccaacttcttcaccccgaccaaggtggctctcagcttccgcttgaagccggacttcctgccagagcatgaatacccccagcccctctacggcatgttcctggtcattagctccgagttccgcggcttccacctgcggttccgtgacatcgctcgtggcggtatccgtatcgtcaagagtcgaaacggagaagcatataacatcaacgctcgctcgttgttcgatgagaattataacttggccaacacccaacagcgcaagaacaaggatattcccgaaggcggtgccaagggtgtcatcctcttggatgctgaccaccaggacaaggcgcgggtcgccttcgagaagtatattgacagtattctcgatctgctcctgccccccgtcagccccggtatcaaggatccgatcgttgatctacacggcaaagacgagatcctcttcatgggtcccgacgagaacaccgctgagctcgttgactgggccaccgaacacgctcgtggccgtggcgctccctggtggaagtcgttcttcactggcaagagccctaagttgggcggtattccccacgacgtttacggcatgaccactctctcggtccgccaatacgtggttggaattcagcgcaagctgaacatcgaccccgcaacacagctcaagctgcagaccggtggtccggacggcgatctcggatccaacgagatcctcctgtccaacgagaagtacggagccattgttgatggatccggtgtgatctacgatccgaacggtctgaaccacgaagagctcatccgcttggccaaagcgcgcgcgatgatctcacactttaacatgaccaagttgtctcccgagggctaccgcgtcctggtcgacgagaagaacatcaagctccccagcggcgaggttgtgcagaacggcatgatcttccggaacacctaccacttgcgcacgcaggagaagttcgatttgttcgtgccctgcggtggccgccccgagtctatcgacctggcgtccgtcggcaagctcatcaaggacaacaaatgcatcattccttacatcgtcgaaggtgccaacctgttcatcacccaggatgccaagctgcgcctcgagaaggccggctgcatcctgtacaaggatgcctccgccaacaagggtggtgtgacatcttcctccctggaagtcctagcctcgctgtctttcaatgacgaggagttcgtcgataacatgtgcattgacgaggatggcgccgtccctgacttctacaaggcctatgtccgcgaagtgcaggagattattcagtcgaacgccgctctcgagttcgaggctatctggcgcgaacatgcgcagactggtgtgctgcgcagtgttcttagtgaccgtctcagcttggctatcaccaagcttgacgaggaactccaaatgaccgagctctgggacaatgttgggctccgtcgttctgtgcttggcgatgccctcccgcgtcgtctgttggagaagatcggtctggaaaccatcttggaacgtgtatgtctcccctccttctcttcttgtatttgaacctccgctaataatcccaggtccctgagaactacctccgtgccatcttcggcagccacctggccagccgcttcgtatacgagtacggcaacaaccccagccagttcgcgttcttcgacttcatgaccaagcgcttggcgaagcttcagtaagctgttggaattagacattcctgtgcgaaagtgctagttttgaaactgttttgtcattatttctgtttttctttttgagaaagacttatccgggtcagcgaaatacttaatacggaacaaaagaagacctgttcccttgacgaatgtatggtttaaaaagtttggcgagcgagaacagagagaggccgcttgggcaagatgatccttggaatccaaattcctacccattggaactgccatagtcctacataactctatcatgcaaattctattatattacaccaacccctcccaatgcttacttccatctgttttgagacgacacagtctcagccataatcagcacgatattcactgccttttaggatgttagtatatgtcaataggacacccggatcgtccttaaaacagaagaactcaccaataacaaatcaactccctcagatacctcaacctcccacctcggcctcaacttcactttggatctactgtagtccatcacattgtgtcgcgagatatgcatgatcttctggttacccatcatgacacccgtacccgacccagccagctgcttcactttcagctcgacttttgcgccgggcgaagcattagcttcaggacggggactggttctgctgctgccgctactgctgccgggactggaattggcattccgcgacgcagatgtagacgcagacgaaagaaacggtgaagccggcgccggctcctgcggcggctcaattgcatcgagcagatcgcgcaaggaattaggcgagttccggcgaacggaggcgtaggagggaaggagtgttggtgctacaggagcctgaacgggatcttgacgtgaatgtggatgtggatgtatatctttctcattccccgcatccccactcccttcttgacctctaaccccaaccccaaccccaacaccagaaacagcactataaggcggcggctcgtcatccgacaccgccaatccactcccactcccactccctacacgcctctccctaaccgccgacgcaagcgcattcacaaaccgcacatcaagcctaaaccccccaccaaccccaatcctcgacccgggcccatccgtcacccacggcgtcgaagcaaccattaattccgcctgctgatcagggagtcgggccacccatttccggatcggcagccacgcgcgtcgcaagacgagcaccggcacgtcctcggcatcgcagactgtgcgcgtcatgtttggccatggtttgccgtacacggtgtagaggaggaccgcgcggttggggctgtctggggtttcgtgggcgcggatgcggtggatggtgaaggcggaggcggtggcggaggtgggggctttggggtgggctgtggagggcgggctggtgtcttgagttggggttattgttaggattgttgcggtgttggctagcaggtctgcggggggagagaggaggtggtggggttggagagctattggtgttgcgggggatatgagggggttggtttttgatttggagttgcgattgggcattgggattgcggtttggtggtggtggtttggtagcttggtggttgatgtggatgttggagggattggttatatcttgtaggttgtgtatatagagatctaggaagttgaagtgatgttgctgagtgggggcgggagtgccggatacgttgtagcactgaggtcaccaattaggaatacagtatatataaacagtcgaatacatcagggactatgtaaccttccatcgcaagtctcgtgctcccctatgtatacaaagaagaatgaagctattcgaacacaaggtcattattatctacggacataacggatatagtatgttgacctatctaccgaggcatgatatataactacaccgactacggagtactacttacatctacgcctcccaatacatacctcataatccattcaatatagttagcatgtcttcaatcgtgccaattttagcacctctagacccaattagaatctcaccacggacagatccttcaccgagtggaacctgctggaaccaggcccacaatatgccgccgaccgaggatagaggcgcagtccagaccggggaagaattatgcgttgaaaggggcaattggaagaaaatcagcgcgagggagttcgtgcagcatcattcgactagtgctgtatgttctaaccaaaggagattagccatgttagcgcgggttagtggctgggaagcttattttcgtctatctaatgccaattgccagatatcaaatggcagatgtcactccggacgtgtcaaacatggatctgtcagtccaccagcccatgagaatccagtacgtatccatcgtctgcttctagttagggcatgccacgaatagatcctccatattacgcgttaatagtgcaggcgtatggccataactgcaatgcataaatggcactacgtggggcctcgaaccggtttctcctcattttagacaaaaggaacccacttttccccgatttcattttctttctttcttctttctaaaatatgaggtcgaaccgtttgtggggctgttactagactgccaagttagcatcctttgctatgggggtctgctaaaggagaacttgccctctgacatttccctagaaaacgagtcattgccttccgtccatattcgggaggattcatattcgccgcgtcgtgccatgtcggacgcacaggaaaaggcgccgccgatccctcctcatccttctgcggggactgccgaggcagaccgcgctgaaggcagtgatcacaatgtcgattccaacgcagaaacccttcgtccagacgaggcgcacccggagcccgaaacactttaccagcgatgtcgggcagcaggccggcggattcgcaatcgcgctgtcatcatagccgagatgctcgggcgaccacatgaaaaaggggatgggttgaattcgccaatgttgccagactactatgaaacactagacgatatccgagcatacgaggcccgccaggcacttgatgaggaagcgcgcctcccgggaacagactatgattcacaagcgcgcctcttgatggaacaaatggggtcccagtccaggctacggcgtccacaccatatcaaagaaccgtgttccgggtcgacaacgccaggaacgccagggactccagatgagtcggcaggacctggcagtccacccggagggctcttatcacatcttctccgtgtatacgccgacaacctccacgcagcccggctgagtagtatgtctacagcgtcagaacccagcccggacgcagaacccaaaccggacgcagaacccatcgcattacccgacacaacgacgggtgaaaagaaagacaagtcgaaatggtacaaccaccccaacaaaccctcccacaactatgcttcctccctcgtcaatgcatccatggatttgtgccgggtcgcgctccccggagccacgggtccccctcccgcgactcccaacgaacgaaagaaggaaaaccgcaagggaaagaaaaacatcaagctcaccgtccacattgccgccattctcgcccgccagcagtacatcatgcagctgtgccgcgctctaatgagatacggcgccccaacccaccgcctggaagagtacatgatgatgacatccaacgtactagacatcaaagcgcagtttatgtacatccccggatgcatgttcatgtccttcgacgaccaggtaactcgcaccaccgaggtaaagatcgtccgcgtagtgcaggggctggacctctcccgtctcgcggaggtacacaacgtctacaaacacgtcgtccacgacatcatcagcgtggaaaaagccatccacgagctagaccagatcatgcagcgcaaaccgcgctataaccgctggctcctcatcctcctgaccggcttagccagcgtcaccgtcggcccatactccttcagcgcccgccccatcgacctccctatcatcttcatgctcggctgtctagtaggcttcatgcagtacgtcgtcgcgcccatctcagcgacctactccaacgtgctcgaagtcaccgtcgccatcctcgtctcgttcatctcgcgcgcgttcggcagcatccagcataacggcgagcgcgtcttctgcttctccgccatggtgcagtcctccatagcaatgatcctcccaggcttcgccgtgttaagcagcagtctcgagctgcagtcgcaccagatgaacgcgggctcgatccgcctcgtcttcacgattatctactcgctcttcctcgggtacggcgttaccgtcggcacgaccatctacgggctgatggacaagaacgccacgaacgaggcgacgtgctcgcatctgccggaggtctggggcaacgaatacatccagcacttccccttcgtcgcgctgttctgtctcttcgcggggctgatcaatcagtccaagccgagacagttacccgtgactatcttcatgggtatgtgcggctacatcgcgaattactttagcacgaagaagctcggcgcgaaccaggttgctaataccgtgggcgcgtttaccattgggcttctggctaatctgtatagtcgggtgtggcacggccatgcggctgctgctattattccgggtatattcaccctcgtcccgtcgggtctggcgtccagtgggtcgattatctctggcttgcagtatgccgaagctgttgcggcgggtgatgctactaatagtgcggcatctaatagctcgcttaccgcgctgggatacggcatgatccagacggccattggtatttccgtcgggctgttcatctccgatctgattgtttacccgcatggaaagaagcggagtggaattttcagtctgtagacctccatcttcgtttatattgtattatttgcattagcgtcttgattccagagcgaaaaaagcgtcccatttatactagatattaataccgaatctcaatctcaatgtcatgtcacaatatcaacatcaacatcaacatcacaatgtcaacacagcccccaaaaaagcaatccaagcaggcaaatccgcaacaaccatccgaatccggtgaatccccacccatcgtcgcatatcagccgacgcgcccaccccactctcgcccaaatcctctctaacagcaacgttatccacaatcctcttcaccggcccggcgacaaacggcacgaagaccaaatgtccgaccgcgccggctagccccacccagtagaacgccgtcgtctgcagcggcttttgcgggtagtagcggttcaagaagagcgtgccggccgcggaggttattgtgccgaggttcagggccaggacggtccatactgcgcggttgaagacgtgggagaaccattttggtaggactttgtcggatgtgggttggagggagggctggaggaagcccgtgttggttgttagttctaggatggcgtgtgcgagggtacccgtgctggttgctaagggtagagtatggaggaggaggtatgggtttaggattagaccggaggccattttgattattaggtggtgagggtggtgagggtagtaaggtgggatttagatgggtgagaaagggagtaagtgagacagcaaggcgatatgcatcaattggggccaaattgactaatatccgtgggctggtgggttgatctcaccttcatccccgttacgctgacaatggccagccagcttcaaacactctttcaaaagcattctcagatatggtgatttcagctaggctgaaaatgatggctcaccagacataatggaagatgactacagcctgatgttgaatgtttgtccccttcagtcaaacacatacttcatctgatctcaacggctctgtataaatatcctcagcatcatgctcaacttctattccttgtcaaccttctccatcaatttggcttatattatcactggtccatcaaatatcggcctgcccattcagcttacccttattctaccaactctcatcttactttctctcacactcctctcccaaaagaccatggactgaggagagtccctcaagtcttctctcacgaggaccttaatgtccatgccaaatcggcatatctcaccccttacatatatttctctatataatcaggtgagttcaaggcctatgaaataccatctgaactggaatagctaatccctcccagcaatatagctagtgcaaattcctccacattattgacgagaaggtcctcctacgcatcagacgcggctacaacactcccgccgacaagctagaacagcaatataccaaccttgtcatggtcactgagcgcgtcggtcggttggcacaccgacctgaacttccaccaacctggaggattcaccccgtcatcagcgtgcagcaatgagagcctgcgacgacggcagatcccttcggcagggaggcgaaaaaagtgcacgcagcctatgccgagcggttctggagcgtctccgatgttgacgccgagactgtccatttcgcaaataccgtacggaagtgtgctatatataatccgtgaggggaatttctcccgtgacagacatctgatgtggaaagcaaagggagctgaaatataaccgagaggtatatctatatatcctcaatggtaaggctcaaccacgcagcgaaaaacttaaccaaagccacacttctaactatcaaaacgcgcagggcgatcttacctgattatcgaagaagcgtctcaaatggtcgactcacaagcgctaaatggtatcatgcgcaatctgaatggggttgaaaaaagcaatccttggtggggattgtgcacagcttccaccgacggtgatatcgagagacattcggtggatgcctcagaaggcaacaattatcccggcattcagaagaccggatccaaaccctgccctcgaactatcgggcaaacacggtgctcgatcacagggctccggaaatgtcgctacaacatacgaggaacgtggccttgcgttcaagaggttgcgtctcttgatgaccagcaactgcatcgggccgtgggtactctggctacgaagcgtggctggcaatctctacgcgaccatccacctatccattggtagtcgtgtaatgctgctggataatctctggatgcagcgcgagcttttcaatgggtagtttgggaccggagaggatatagtttggcctcccggtaccatagatcctcgtcgtgagcggccatccaccatactcgtcaggtttgacgagtacactggtcgcgggattcggccagaaatatcctcagcagtctcgattgtccgttccacccgcgaatttttccttgggacaatacagtgcactcgtacacagtttccagtaatgctagcttatgcgatcactgtgcacaagtctcagggtaagggtggaccgggccgttcttaacatttccgagagaccccaatcctctggactgcactatgtggccgtctcgcgtatccgcactctccggggtatcctgttcgaggagagcttcaactttgaccgcatccagcctacacagcctacggcgacaatgcttctacgtttcgggaaccgtacccggcgcctacctcagcatattacgcgcgaggctgttcccgaatcccccgtagccagtcttctacttcgaccgtctccgcggcagtccactccgtcccgaattccaatccgctctactaatgcttcgtactcgagttccttgccttcttggagaagtacggaaactgttctggttcgtcgctcagctgctgctatagccttgtcattcatttactgaccgtattctattacttgtacagtcacaggctccatttaccgacgattcagaatatatgggttaaggatctgacagcgagaaaatgaagcttgaacgtcacttggacgattcgtaaagtacgcgtcttatcgaaggcgctgaccaaacacgcgatgcggaattgaagctttgtgaagacgatatcaaaatgagaagatcacaggcatggaagataatgtcaagaagctgccgcctcaacatgcctatccttttccacgcctcactgtcggggatgcaccaagagataaagggggaaatggctggttaatcttgaaccaaatgacccagagtcaacacgcgagaaggttgagcttctgacatgtgggcttatatataattttagtgagttcattcttttctcatttacgtgatttgtctctattgctgagtgttgctgatacattatttagaaaagtggaacatggtccgtgaatagggatttctatcaccactttaagtccacttgaagcggtcaccagattcaacagcggatatgggagatgggaacacacatgacgagctggtgcttatatgaagattatcaagatggctggtcgacgaagaactttactgtcgcaagctctctcgcaagctctctctaggagggagatgcgagaaaggtaattataagaaggtcactgggattggggcactgaaaaaaattcgcccaacagcagacttcggttctctccaattccttgaatttcgagatacccagcaaaaagcagaaatctttgaaatcagccattgatgactgtgacgtggacgattgctgggaaagctcataccatgcgcttggttcgcaagcagaaatgggagaagggagatccactagtaagaagcagcgaacatacttcgccatctcatcattcggagccggcatgatccggatactcagagggtgattgtggaatccaagctacaggtagacagtgatgttagtgtgtccatgaagcccgccagcaaacgcctctaacaattcaaaaaacagctccacccccacaagtgaccttctcttgccctcgaagctagaaccgacataccaatccgatggagaaacagtctgacgaaaaaggggacgaactccgcgcgttggatgggaccgcaaatggctcgacaccgtccagattggaaggattaaccctaaatggatcgacacaaagagtaccgcaacagaagaaactaccaaggctctagaaaaggaaattgattcctctccatccccactgtatctgaggtaccttggacccggcagctcctcacaagcaagcggctgtcgcagctgggatatatatcatattctcttctttacggggaaacacaggccttacattagtgattttactgtgccaatagtatttacctattctcagcctttgcggaagtttcatggtatcatcgactcgcgcctattccgcatggcatccgggtttaggacatgttactccttggacaaaacctggaagtcatgcaacgcattttcactgtggcatacagatggttagctcgctccagcggatggaacttcaggagcatggaagagttttccaactttgcgctggcgttgatgattgcggtggataattgattggcgagggttcttagagagagactagaattgaatagtgaagcccgtttattctttgaaaattgataccctctacggtgtaagagtgattagattctacaagtgttatgcgaactcttttggtgacggtgattttcacgcgacgtaatagactgtttttcggtagttactggcaagcaagctccacgtctccgaagtggattactctcttgcgcaatggttgcctatgctgtgtattgtctggtttgaactaacacaatttcgcagcgctatggatgatctcgacgtatagacaaatgatatctgacttggtggatcgaaaacgtcaacactcgatcgatctcgggactgaccgctctggcagagggtgcctatgacacgtgacaagtaattcacagtcacatgtcagctcattcttccccttttttgctatgttgtactacgaattacagatcaggaagaacatacaagatatattgcatgtggtctaataactaaggctctcgacatagtgaaaaaggaatataaacaatgccaacataaatctctcatggacaagacaatcataaactctcagaaatccacagaacaagcattccacagtatgaagacaacgaagagcaatcgatcgatatcgcgaacattgagcagcaatctcgttgaattaagatcgattaattgccaatcttctccgcaaaccacaccaccagatgactgacagtcgggtgactccacgtcaaagtcggaggcaccgcaaccttgagcgtctgctgcagctggcgacgcaaagtgaccgtcatgaccgagtctacacctagatcagcgagggctgccttggaatccacatcctcagctgtcatctgcaacaccttggccacacagccccggatcttctcatccaggtacgtcttgagttccggtccggatgaaggaatcgcatcactgccattagaacccgcaacaaccggcgtgttgccagacaacgcgcccacgcgacgcaccgcaatatcattgaggatggacaccggcaccggctccccgtcctcaaaggcacgacttcgcaagacgactccgtggtccatatcatacttggcgaggtgctgccaggcagaaaaagcctcatcgcgcgtgatatctgtgattcccttggattccaattccgcattaatgaagtctgtgctggcgcccatacctaggcctcgccacgacgtccactggaaggacacggccgagtcgctcaggcgcgcccggtgcgtagccagtgtatctaagaaagcgttgccgctgccgtaagaggcttggccagtaaatccgactaggtttccgcaagaggaaaacatgatgaagaaatcaacactcttcggggggaagacttcatgcaaggctagtgcacccgcaattttgggcgcgagaacccggttgaaggcgtcgcgtgtggtttgcattaccagctcgttatccaggacaccggcggcatggacgacaccctggactgcagggagggcgaggcggtctagggccgttgacagctgctccactgcatccgacttggtgatgtctagggggaggacatggacggaggcaccgcgactctccaggaggcggatcttggcaatggcaggctggagatccgtgctgacctggtcccaactgcggcgaggcggaagagcacgtcgcgagatgagcagtagacgtctggctcctttctcgaccaggaagtcggccacctcgagcccgagtataccgagaccaccagtgatgagatacgtgccctcggcgcgaggaagcaggcgaggaccgtcactgacagggcgcagcttgctgcgcggtaggctgcggaaccgcgaggtgcgggcgattccatcgctaattcggatgatgccggcgccgtggatgtatctcatcgtggagagggggattatgggctcttcaatgtcgatgagggatcccaaatcgggatgctcactagcgatgatccgcgccagtccaaacaacggggattgggccagggcagtggcagtttgaccatcgcccacgttcgcagtgagtgtgaagactttaatgggcagtgagccattgacaatgaatttgataagttctagcaggttccaagtgaacgactcggatgcagcgggaatctctgccagcgaggcgacctcgccggggatgtaggccacgacggttcccttctcgagtgggagggatagagcgttgctgaagaagtcctctgtgccggagaactggaaagattgaatttgagtcggcagagtcgcggcatacttggccaaggtggcagcatcgggcgagatcataatcaccgtcatgatgggcaaaggctcttcggccggggtggccggtggccaggcgatttgatgcacgagactctccatgctgccacttacgccgggtgtgccttcaatctcagagaaacgcatggccgtgaactttgcgaggacctcacccgtcttgctcagcacgctaacgtgagaggtgggcactgcgtcggaggcctccttgacgaagagccagctgatcttaggcggatcctccgaggtgaatatctccacacgctcgatatgggccggcatccgcagtgcagctgtttggaagacggtagagccgatggaggtggcagcgtcgagaatcggggcccaggaggaagaatcccagggcaggggcgcatccccgaggactgcaggattgacatcaacgcgcgccagcatctccttggtattgcggtagtgctctgttaccgcccaggggaatcccatggctgagacacctactttgtccaagtagtcaattgaaaagttgtctggaagcttggtgaccagtcgcgcgttgacggcggcgaggtcgatgcgatctactggacccagaaccttccggttccaatatgcagtggtgtgagtgacccaggaggcatcgtcatccaacagcgaaggctcgctcggaatcaggcgggaaacgaccttgacctgatcctgttgcaccacgacctggacggaccgtggcgcgttgatggcgacaggaacgcggagcaccacgttctggagtacctgggcaccggtgcccttcaagaaggtattaataagaccagctgccggaacgatctcggtgccgtgcagaggatggctgccggggaacggcttcgtttcgttgtccagccgggtagtatagacgaatgtgtcggttccaggcactgcaatacgctgtcctagaagcgtgtgcttctcgacatcatgcgtgaggccagtattgaggggcgccgtctctaccttgcgccagatgggcttatgcatccaggtcgtcgtaggcagtccggtggcccagcgtccaggcatctgcgccgcccagttcacttctgcgccgcgacaatgaagctgtgcgatactgtgcaggatatgcttctcagtcggcttttggcgaaggagagtcggaatgaccgcaaaattctccatgcctgcgtccataagcgtctcattgatggagtgagacaccactggatgggctgagacttccaggaagaggcgatatccgtcctcaacggccgcctgaatggccgtggtgagacgcacgcggttgaccatgttgccggtccagtattccacgtcgcgcaggtcctggccgcgagcatcgaccagtgcggtagaatacagcttgatggtgggagccgtgggggccagagtctgtccgagcgcatctcgcaggggatccatgaggccattcagagttggactatggaaggcaatgtcgctcttaacggtgaaagttttcacgcctcgtgccttgaaggcttctactgcctcggccactatctccttgtctccagccaccacgcaggaagaaggcgatgaatcgatggccacaaccaggtcctgtcgggagcccaatatctgttcagcctcgccactaggaaggttgacaagaatcatgccgcccttgcccatgacctgtcggtataataacgctctgcgagtcacgataagcgcaccctctgctggggataaagccccggccacaacactggccgcaatttcgcccactgagtggccgatcacggcctgtggagtgatgccattgctctgcagcacggcactaagtccgatttgcatgagataggtcaggatttgaacccgatcagacgactcaaaatcgcctgtccggagcagctcgatgggtgataggccaatctcagcttggatcagctcatcgagtggctggatggctgcggagaacacaggattgtgaatcagttgcttgcccatgtctggccactgcgcaccgtgcccggaaaatacccagactacgtccttgctgatttctgtgcccaacacacggctctgagtcgtgaaaggatggctgactccattgaccaatgcttgtaggacttgggtagcatcaagatggtcgtcaactacaagcgctgctcggtagtcatggtgatctcgtcgcgtagccaaagtcgtgagaacttcactcagattatggtcttttccttcagcggccatccactcgcgcaacgttttggcctgcagggctagccgtttttcttggggccccgacaataacaagaggcctggtccagtcactgctccatcatccaggggatctggctgtaggacatgactgaactcctcgatgactgcgtgagaaacggttcctccgtagccatacgagcaaacacctgctcgacgaatggggtctgaggagggccacggagtggcctcctgaacgaccttcacgccggccttgtcccagtcaattcggctattgagctttgtcaagttggcctggggcggcaggatgcccttttggatagtcaggattgcttttataaagcccataactcctgcaccagcctccaggtgaccaatattcggcttgacggacccaatgtagcacgggtcgtcggcgtggcggtcagttccgtagacgcctgcaatggctgatatttcagttgggtcgcccaagggcgtagacgtggcatgagcttccacatatcgcacggtgctaggatcgacacccgcaacggtaagagcagtccgcgctgctaactgttgcgctttggcattgggggccatgatgccgttcgtcttcccatcctgggctactgcactgcccttgataacggccaagacattatcatggtcaagcaatgcacggtgtagacttttgagtacgagggcgccggcgccttcacctctagcgtacccatgggcgtcatcatcgaaggacttgcaagatccatcagacgagatggccccggctttgtcgaggacgcgggtcagtcccggtccacagagggcattgacgcctccaacaatagccacctttgattcccccaaccggatggcctgaacaccatgatggatggcgacgagggacgaggcacaggccgcatccacggcactgctgggtcccatcaggttgaggtgataagaaatgcgattgggcacgccacaatacgcggtgcctatgcccatccaggcctcgacattcggcagatcctccagcactagcttggagtagtcgtccgagttcacaccccagaagaccgccgtgtcgctcccagacaggctcttggcaggaatgccggcatcctcaagtgcttccgaggccacctctagcgagactcgctgttggggatccatctgctcggcctccttaggggagatgccgaagaactgacagtcaaagtcctcgaggcgatccaagaaataaccacgcgatgtcgtcttcttgagctcttttgcatttcgtggatcccggcgatagtaaggctcccagcgcatcggtgggatctcactcactgcacttttctgactgaggagcgattgccagagaagctcggggctgtggttgcctcccgctacacggcagcccattcccaccacggccacgtcggtggagaattcctattcactgtcagtccgaggtacgcttgggcagaaatgacaacgttgggaggggccacatacatattcactgtattcagtcttaggggtttcagctggtgctggggatgttttcccagagggatatgtagaaggtgaaacagaattcatgtttgtcagtagcagtttggagactcagtctccttagcaaagtcaagcttattcatgaaaatgtctacagctatcggttattgatgtccctttatatcttttgctcaccagtacaacatcaggaaatcctcccatcacccccctccacggcggtttattatcgtctcggaaaagccgatatgcagcatcaacagagatagcggattgtggtctagtttccgaatggggacatctttatcttcaaccattcgtccattcggggatattgtcgtgtttccgccatattgcggccaggtttcgcaagaataaagttcagcgacagataacggggatctatggataggagccaagaattcttttcccgtccgtccgtaagtaatggtaatggcgatcttgagacatcgaggattggcggctgcagactgtcgtacaccaagggccaagcctctgtcagccctaggcctgaaagggatgcatgctgatttttggcccaaaggagtgccgggaacgatttcttcaaaggtactagatgagctatctcaccatttaggaacctcatgagtcctccgtacagatactccggaggaggagaaggtgcatcgttcaaaaactcccaagtgtggatcaggccatttcaacatgcttcaacaggcagcccatggggaactgattgaatgcgatagctagtatatatgcgacggtagagacacacgacgttttctggatattctttaggagaagagattgaatactcgtggttcttctgtaaaatccgattttcaccagttggtcaacattcgcaagcataatggctccatttgttccctaccactactcggccggccagtcgactattgttaagtgtgtaactagctccctttaccggtcttttgatcgctgacatagccagatttggtggtcttctcaccaccgagttcctcgaacctccaccaggtcgttgttttctcttccgtcagacataccgccacaccattgaaggctcgatcccagaaaatctgcgcaagctcatcaatagcgccgatcgaccaaagggtccgcctccgcatttccaccaattccaaaccgagtacttccgtgtcggacagggagtgctcgggattgcagtggacggggtcgtccgccgcatcactccagaagatggcgaaatctcggtcaaggcgggcagtgtgcataactttttcatccatccggattctcccgagagcatgacggtctacctgagtgcgtcagactccgggaacgactaccagctcgatcgggtcttcttcgaaaactggtacggctattggcacgatgcgttgttgcacgacggagggatcgactggatccagttcctcgcggtaatgatctatcccccgcacaaaatcttccttatcatcggctgacatagtagtagattcaagacggcggggatgcctacacacccgctcctgcatgggtgccctttcgccggcaggttggatactggacctgtgtaatcatcggccgctggattggcggactcctagggtataagccattcttccgagaatataccacggattgggactttgctgtcgccaagatgaagggttcgttctttcagcggcatctggtgcatgctgcattcgaggaggagaaatcctggacgaagcaggtagagctggaacccaaggctaagcctgaaaacgctgagtttgagcagtggacggaggatatgtctcccacctcattgaccctgggcgcagttgcgtatgagcaggtgcttttcaacggcgtacagcccgggtcagcgaatgagtctaatggtaactccacaggggtcgagagcaatttggagcagtcaggttcttggacgcagcgacggacagtggtggacaatgcgggaaagtagagatatatcacccgaaacctgctagtccatgagtcccagttcgtttgaattcaattgttatttttactccttgcttcctgtttcctgcttcctgcgtcggtcgagtacgatatgagatgatgattgattgtctagactgagatatgttcagatgatctggacggcggggaaaattcatgatctcacgtggctggcgtgtcacttgctatagaacactacgtctcttatacaccctattcaaaataatcctgcttcccataaattcctctttctacgtggactattaaacatagatcggttggttgtcgtacaccagggctagcaggatttcaaaacctcctctcagaggttgtagcacacgtttgacggccaactgtccattgaggcaagtttcccatagtatttcgaggagaattacaaaaacatctttgataatagttaggcagacaggacaggatatacgtggagacaatgtatcttgctgtgagagctctatacgagcagactccgattctcctttaggaaccctaaactgtcgcccacctagctgagtcccaatctcaaaataggtttatccacgtttatgaggacataagtatagagaatctgccctgaggactactttccggcatcaacactatggatctcctacagctcgcaccaacgcaccttctggcgatactgctcagtagtacgggcgcattcgtccttgtcacatacctcctccgtgcaggacatcgacccccagagctcccgaacggtatggtattgcaaaggataaggtaggaattcaaatctaacagatgcacagggcctccaactgttcctctttttggaaacgaactgcaagtgccaaagtcggatgcacattttcagtaaaggacaactctctgtgatgtagggggttaacatgctaagtacttcacataggttttctcagtgggctaaggaatatggcggtttcttcacgctgaagcgatacaacaacaccaccatcgtcatcagcgatcagaaactgatcaagacactactggacaagaagagcaacatatattcccatcgaccagcatcattggtatctcacctgatcacgcagagcgaccatctcctggtcatgcagtacggggagagatggcgcatgttacgtaaaaccatccatcaatacttcatggagccccgttgcgagcgcgagcactggaaagtccaagaggcggaggccaaacagatgctgcatgactatctgatcatgccagaggatcacatgctgtatccaaagcgttacagtaacagtatcaccaactcacttgtctttgggattcgcaccaaaactgtccacgatgagtacatgaagaagcttttctatctaatggacaaatggtctttagtgcaggagctgggcgccaccccacctgtcgactcttttgctctgctgcgctatgtgccgcagtggctgttaggcaactggcggaaccgagcggtcgaagtgggtgatctaatgcagtctctttaccagactgttctagaccaagtgaaagagcgccgccaacggggtgttcagcgcgactcctttatggatcgggttcttgatacactgaaacaaactccgctctccgagaatgaactacggttcctaggaggagttctgatggaaggaggctccgatacttcttcctcgcttatattgaccattatccaggccatgactaagtatccagaagtgcaggcaaggtatgctgaccgcgccaagttttttatccaatgggaaagctcatagggtggtattgcagggcccatgcagaaatcgactctattatcggctatgaacgctccccggcttggtctgaccggtccaagttgccctacatcaacatgattatcaaagaatcccaccgctggcgtcctgttagccccttgggggttacccatgccgttgcggaaggtttgttgaaaccggtatcttctctctcaaaataacaagagattggctaacaaatctcctcagacgaccacgtcgatgggaaactcatcccgcaaggatcgagcatcgttctcaacgtctggggcatgcatcatgacagtgagcgatggcaggaacctgagcatttccagcctgaacgcttcgccgatttcccagccttagcctcggcctacgcagcgtccgaacggcgagaccacttcggttacggggcgggccgacgcatctgcccgggcatccacttggcggaacgaaacttgataatcggcgttgccaagctgctctgggcctttgagttcctcgagccacccggcagcgacagtgacatttcggctcactccggcgctagtaagggattccttcattgccccaaggactatggatgtgccatccgtctccgttctccggagaagcgagggaccattatgcgggagtttgccgaggcacaagaggtatttgctcgatttgattagattagagcatacgctctaatatgacgattaccccctcctctactccatcgggcattgttatgcgagctgtcagcgcggcatcaaaaccttattttcctgcagatcatccgtgtaatcaatgcagtatgttccgatgtggatacattcgagtcaatcaaagcccacaattggtatcgcctactttttcctgacattatcttacttctttgcttctaacggcataggattttaagtttatagcaccggggaagcggcgaggcaagtaaactaaatctattcgtgcattttagtattaccacatggctactacatcgtacctagaataggcaatttgactcctgtacatcgatgcacgtcgcattgtagaggcataatagcatcactgtataacggcaactccgtttctgcagctcatgcatgtcgctgcaaggagcaccagaaggaccttctccgattccccacagattggaactaatttttgagataaggtgagtgctctagcacgccttaggcttggttggggttcacggagtgtctggataggacttgggttggattatcgtgaagaattcctctagcgctcgttggtagtgctataggactcgctatcgggactcacgctaggggttactttaatttactttgatttatttaccaatttattgtattgctacctagctaactacgcctcttccgcttgaaaatatttcttcactatcactatccatgtctataaaatctgtgattatatgccgcttatagtttagtactagtctattttataccatatacatggcgatcccacgtgtatctatctttccaatataggacgaagcttttccattagtacttagtaaatctgaccaaaactgaatgcccgtaagatctctcacctataaaatgatagaatgaattccctacaaggccattccaaccttggaaggctacctaatgtctattgtcttatctatccgacttcggccaatagaacaatcacgctcgcctattcttccaacaaagggatgtggcaattcagccaatgtccacgacaatagctgacgacatgacacactagtgggatttgtgggtgtttcgccagcatattgctcttttctagtctttattctgctcttcgttttttttcatgtctcatcctgtgcagggaagcccataatctacaacccctgtatttgcgcgaggcttcgatatgcaaacctcaggcatccaatcccaacacaactcatttgtgtcttcgatctacctttcggcccctccaccccctcccatctagtcttgagtagtctggagggaaattgcttttaaggttccgaccgccatttggagtcgaatgaatctggtctgaatgaatatctgaattttgctgtcctccactccaccgctccgtcatgtactccactttctccgccaacttcgacaccacgatcgacgcctcccgtgagaaatcagccacgcctatcacagctccacgaccaaagcgcaatcaggttgctcgggcctgtgactggtgtcggctcaatcgtgtcagatgcgatgacaagcagccatgtcacaactgcctgaatcgaggaggttcttgcagcaacacaaagccacaggaggccacctcgctcccagctgcaaatcggtaggaatcagatatctatctccctcatgatcacatggggatgggagtaaatggtttgctgattcacatcgacagagagttgcaacggctacgaactgaggtcaaggaccttcaagatcaaatcgcgaaactcaaagatggagcggaaatccaagcacagacgggtttcgcgacgcccccactatcggatgctgcccacacttcgttcgactttgcggagctcagcaataccacagaaggatggcaaggtctgcagcagacgggacagattcactacgggcccttgtcatcctcatattttgtctctcgaatcactcgctatctctcacaagccctaaaccagccattggaagatgcgaagttagaggcatgcatggcccgttttaattatgttaccccgacccatcaaccctctcgatgggatgcaagccccaacagtcaggcggatcagcctccagatggaaacgaggaggccgagggtctgacccggtcacaagaggaacactttatcaatctactctggcagtcttttcattgtgtctatcctatcctcgatgaacgcgagtttcagcaacattatgactcactatggtctaattccacagatggaatgtctacccggaagccatccgccttggtcgatgtgctattagcggtctgtatgcagtacagcagcaccttctttatcaatggagacaaccagcagtcagattcggagtctgaatggcagaccaaaaacgcgaatctagccagtcggacttactaccaaagggcccagaggcttctgcagagtgagctcgaaaatccaaccatcatggtcgtgcagagtcacatttattcgattgtctacttgtacaacacctccctgctgaatacggcacacattaacctgggtgccacgctacgaatcgcccatgcgctgcggctgcatatccgcccgctggacgggacctcccccgagcagcaggagctacagcgccggatttggtggacactctatcggatcgacagccagctctcgatggccctgggtcggcccccactcattcagttgtcccatgtcagctgcgggctaccaggggatgatcgggagcatgcccggctgtctggcacagtcctcctcacgaataatgaggatatcagctggctcagcttccatgtccagtgcacaaagctcatatatcttgttcagggtgtgcagacagcgttacaccggaaatgttcccagttgctgagcgggaataaggttaaggatctatatgacgacccgcgcctcctcgagagcttggcagagtttctcggaggggagatgacagccattcataactgggttcaaaacgtgccgcagtccctatgtaatgctcgcaagggggcgggggacccattctccaccaatcgggacgcgttgaatctgtctccgtatagcccactttggctgcaatgccaacgtctcctgctggagctccactatcaccatcttgtgatctcgacactgcgtcccttcatgcgattccctcccgtgagctcctccgtgaccccacggaccgacgtttacaatatctcctgtctgaatcacgctatggcaattaccagtatcctcaaccaagtgctatccgagacagatctcctgcgcgggtggtcgcccatcttccagtaccagtgggatgctatcctgtgtaccctgggatttgtgctcgccaatcccgtctgtcccccaaccccttctgcccgcaagtcattgcagacggcgattcgcacgctggacctcgtgagtgatcactttttggcagccaaaaacgcggcgcaggtcgtccgccaagtcagttgccaggcggatcgactcatcaataatgtccaacaaggtctaactcggcgacaagtaccgcgtacgagccagcccttgtccaccagggcgcagaatcccaggccgccgtcgaatcagaactcgttcgtcgcatccgggcaaccgggggtccggtccaactccctaaagcgggcgctgccaccgaccaccctggaaatgtcgtcctaccagccaatgcccaactttgaagcgcgcatgcacctaacggagatgatgccgattggttcattacccgagctatctccttctttggggacgacggagtctctctcgatgccctcggccacctctgctgacatggtcaccggtactgaagcccagtggctgcatgcgagtgcgatgatcatggattcctggactaccaatacatgattaaccgtgtgcttttttcactattccttttttgccttactgcatttacattttgtccgacttagagtaccataatccatagttgctaaccaagcagcgggttctgctagaggggagaagtagaaaagatacaaacaaactggataaataacttatttatagtacatatgtactgaattatgtgttggagcaaggattaggatataactaatcatattatcatcttacgttgtgaaaattataggaaaattttcgtagactcttctagataccagtagcaagttttagacacaagattaggaatattcacacttccttatccttgtctttcttttcttaacagagacataggggaggacaattcgtatattaaggggattggtatagaacccccggccggaggtacaccttcctaatcgggtaacgctagagatcacatgatccatcacagtctcgttactattcctagacgtcttttttatcaattatacgaagaaatcagggtgacgaagatatatcaacagtgtagaactaggtacagtataaacctacgatatatctgatttctcaagagccaaaatgacagatcaggtgatatcttgtcgtgtcaatctagcctggtgacctggcacagacgaccaccagcctcgacttgccagttctcactgccaatagccgtcggcacatagaaagtttggaacgaatcatatttttttcttgatcgcgtacagcgaattatagttgtgaccgtaaaaggtctgcttccaatccggctgctggggatccgcctgtccgcatggtaagccagtggtctcaaatcgtgaatgtctgtcgtcttgcctcgctcatatagcatcccgaatctggactcaaggccgtgaggatcggcacccatttggttgtcatccggtctgccagggttttcatcttggtgagattcgcaccggtgggccagtctctggatgatgtgtgtgtcaggaagcatatcgaaacaaaaaagttccacggcatgtcagataaagagaacgtacgtagataagatgacggtaattgctgctgtgcgccacgcaggcagaactgaattccagacattgccagtcacagatgacgagacattcagaccaatacccacgaacgtgacaccatccacggtgattctctgtatggcattcgtgagttgcgagttattgtgctgaatgaggtcgagcggaagaagacggccgccatattgcgcgttttgcactagttgcatcaggtcgggctcgatcagttttgtataatgctggaaatacgatggtgactcggtgatgttcatggtataggaaatgtccagtttgtgcagttcttgcagaaagggcgccaacagtctcttggcctctactgcggtatacacagggagtgtcagcggggtgagcagaaacgttgagtgtgtgatttgtgcaatcgccatcccaccagatgcggtgtatgtgggtaggtggcgatggtagtgtcctacagcttcaaagaaactgtgcgacgaggggttcttgttctcaaattggataacgacgcctgtgacggggaagtcgggaaacgccttgacggtcatggagtacacgaccccatatgtccctccgccacctccgctaagtgcccagtacagatctgggttctgggtaggcgatgcggtcagaaatcggcccattccatcgacaacctcccattccaagacttggtcggcactaagaccgtactgagagctcagggccgagtggccccctccttgcgtgaaccccccggctgggcctacagtggaacattccccggccactatcaccagcccttttagataggcagccttgttgatgtccgtgccttgaacgcccgcagccatccgcatcgctggcccggtatagtgtgcgttggtatagttcaggaaatcaatgtccttgagataatgggtccagatggatagtgcgcctgcaccagtcgacttccctaaataactaggatgcatgattagcgagagcatggcattgttactggatgatgcatactcatggcctgtgttgcgaatgacgagacgaatgtttctttcctgggaaaatcgaatggtctgaatgaagtcgtctggggagctagcattgacagcatacaagaccatcgcacctagcgtgcacggcttcgatcggggggtaaaggcatcgcaggtttcattggccacggtggctgccatgatggaagaggaggataaatcgctatttgatgcggttgattcaacaggccggcgatggggctcgtcggatgcattggattacttactggagctctggcttggtccactgctgtctcagagagcgacactcattggcgatatagagggggtcatgacaaggctgtcctagtggttgcgtgttcactaaccatccgccaatgaatgtgttgaaccgcgaccagtcgtctgaggacggccaacatgtatcaccgggcatgcatcggcaattcgaagacaatccagtcgaaggttgtaggattgatatgatacaaaataggacaaggtattggcagctgtgaagacgcattgtgaagcgagctgttaagtaaatccaatttcgatatgcccgctagggaaaaacaattcttgggtttaagaacatataccattgatctcgctctaggttctcgaatctaaaactgggtgccaacatgaattccgccgtcgaccaacatattcgtgccagatacgaagctggccagcggactcgccaggaacactgccacggccgccacctctttcggcccacccaaccgcttcagaggaattttcagccgctgttcctccacccattccgggttgatctttgaatacaactcccagggaccacccttgcacagaatcggtcccggcgagatggcattcacccgaatgctcttcggtcctaaaaagtgggacaattcctggacatgctgcagctgcgctgccttgcagggcccataggctgcagggggtgaccggtagaattcacgccccatgaaggagctctgcacgatgatggatgcctggggagacttttccaagtagggagtggccaccttgaccagctcgacgaaacccatgacatcgatcgcaaaactgctctcccagtgctctgtctcaccttccatatgcatcggcgatgctacagccagtcagtttgcattctaactagggagtgccgggaaatcaatcaccattggcgataatcacgtcaattcgaccaagtcgctgggcggagctctcgacccactggacgagggcatttttgctagcaacatcgaatgccgttcccacggcgcgggcgctatttccctcggggagcgtaggatagaagtcatcatactcagtattggtgacggtccgggcgcagtaggatacattggcctcctcctccaggaatttatgcaccattgcctctcccataccccgcgtgcctcctagtccacgttagtcagagctaagttgatagatttctctcttacttacctgtgataagcacatgggcacctttgagaccagtaatgagcaccataatgacaataactttcgaaatatttgattggaatgtgaataggaacgtgtaggaagataaaacaaagagacctgaaaacggcgaaataggttggaaataatcattggctctcagactatacgttagcctcctcaagtaacaagttggccaaaattacccgatttggacagtccccaactccgagactcctttgggaagtcaacatatatttggactagacagcgaaaggaggaacatgagatgggctattgtttccaatcccttttgagcccatcagtctccgccttttctagtcggcaatatgattctctgttgaaggagttttgatagtcttacagcgctttccatcttcatcatggtagaaaatcatcattcgtctttagaggaggcaaatacacccgtccagtccgatggtgatgtgcagaaatccgagttggctgaaattgatggaccatcgtcgaaatcttcacggattgcagcaggggaatcgattgcagacagcgttcgcaacttccttgaaatacgccaaggtggcattcccggtgacactggagtggtctttcacaagatctcagccattggaagcggaaccggagtgagtacatctaatccaaccgaaagaatcaggattgacgcttgatagtcacaagatgcacccaccgtctcatcggcagccgagtcggcttttgggctgttgagtcctctacaaaatcgacaaaggaaacagtattctcgacccattctcagcggattctcaggcacgatcgaccccggagaaatgttgttggtactaggtaaacccgggagcgggtgtacaactttcctgaagaccctgtcgggcctgtgggatgaatataaggaaatccagggtgaactcactgtggatggtcacccactgctagatgtgatggcacagcgaccacaggatattctcttctgcggttagtcatcgtttgatgtttgtcgttttgaacacacactgaccgacatgtcttccttagccgagtctgatgaccattttcccacgttgactgtggcggagaccctacgctttgcgaccagagcacgatgcggccccgaagtctcggccactaaaattgacacgatggttgctcagctagccaagctagttggtcttgaaaccgtcttgaatacgaaagtgggagatgcgaagatacgaggagtcagcggcggagagcgacggcgagtgtctttggcggaggccctggccacttgtgcccagtaagtgatatcttctgctcattcaagtaccaaactagcgattcctcgactcacacatccttacagtctgatttgcctggataatccaacacaaggactggactcatccactgcggtcgaattcatggaaatgatgcgtgagtggacgacacaaagtcgatgtgtggccgcgatgagcgtctaccaagccagtgatgcaattgtctcctattttgacaaagtcctggtgatcaactctggccgtcagatcttctatggccgtgtacaggaagcgaaggcatattttgaagatctcgggtttgagtgtttatcgaccaccaccgtcgctgacttccttaatgtgatgtccgctgatccagacgtgcgacgagcccaagaaggcagggagaaccaggtcccacgaacggcggaggagtttgagcgtgctttcagtgcgagtcctatctaccaggaaatgcaagtgtcggtacaagtggccaaggagcgttcccaagcccatcccagtccccttgtcaaaacatcggcctttgctctccccatctggcatcagatttggtactgtgccagtcgccaatttcgcatcgtcaccagtgattatagcttgtgggcggtggagctcgccacaatcgtcgttcaaagtctggtgttgggcacgctgttccgaaatcagcagcgaacgaccaattcattgttcattttcgcgtcttctttattctactctgtcttagtcccggcactgcagtccatggctgaatttggcaatggattcgctcagcgaccgctcatcctgaagcagaagcgataccagatctctcgcccgattgcatacgctctcggcttggtcaccacggatgttgtgtggaaggtggcagcgatctgttacaatatccccctgtacttcctgaccggatttcagcggacgcccggaaatttcttcacctggtttctgattatctaccttgagcatctcgccctgtctatgttctttcgctcggtggccatattttctcccaacatgcatcgggctgtgctgccggtggggattttctttaatatgtatgtcctctatacggggctttacgttcctgcaccacagatgcaggtatggcttgggtggctgcgatatctaaatgtcagtgggtatcatattatggggtttggacaaatgctaacatgtgacagcccttgtattatgcattcgagtccgttatggtgaatgaattcggagatctgagctatcagtgcagtatctcggatctggtcccatcagggccaggatataccgatatagcccaccaggtctgtaccgtggtgggatctcaacccggggatcgtcttctgtccggggattcgtacatccacgcccagtatggattcaaaacctcccacctctggcggaatgtagggattaacgcggccctattcgttttctttgccctttgttcagggtaagttatcagacgctcaagcctagttcatgagaaaaatctacgactgacactgggatttaacaggatcgggatggagatgctcagaacacccgcaggtcaactagccacagttttctacaagagcagctcacgaggaattcaccgccgcgataaaatcgataatgaaacaggatcagtccacggaaacgacattttggacgcatcggctggccaaggcaacgacgcaaatcggtcacaagcaagtcagagtaacgccctttcatggaccagtctctgtcttgacatcaaaaccagagatggcgatcagcgtctgcttaacaatctgagtggctcgatcaagagtggacaactcaaggctctaatgggggtctcgggtgccgggaagacaaccctgctgaacgcactggctggtcgttccaccattgggactctcacaggaactctggcgctcaatagtcaattgcttcccacgttcttccgaagtcgaatgggctacgtgcaacagcaggacattcatcttcctactcagacagtgcgcgaagcattgcaaatgacggcgcgacttcgacgcccagagtccatccctctggtggaaaaaaatgcctacgttgaaaaggtgattgagtggttgaatatggagcacattgcggatgccctagttggtgtccccggggccggcctcaatctcgaacaacggaagaaagtcagtattggcgtggagatggcatccaaaccagaaatcctattcctggatgaaccgacctcgggtctcgatggccaatccgcgatgctgatcgctcgcttgcttcgtcgtctggcagactcgggacaggccatcctgtgcacgatccatcaaccggcagcagagctcatcgaccagtttgacaagttgtatctgctgagccgcggagggaacttggtctatgatggtcctcttggaactcgctgccacgaggcaatcgagtatttccagtctcggagtcgcccctacggctcagaagagaacccggcagaatatttcctggaggttattggggctgggtctcgaaacgacgcccatatggattgggctagtctctggcatgacagccagcagggcaaggagcgagagaaggcagaacaaagtctggtccctgccgcagaacactccccaccgctggagcaacagtccctgtattcggtgccgttccatgtccagctgtgggtggtggttcagcgaacatggctttattattggagagaaccagattatgtcacatcgaagctctggatgagcgtcggaaactccctcctcaactccctcacctacttacagtctcccaacacagagcgaggggcatataatcgggtcttctctgctttcatgtctctcatcgtgggcccccctctagggcttcaggtgcaaccacgcttcgtgaccctgcgggatattttcgtccaccgagagcgagagagcttgacctatcactggctagcatttgtcttatctgcattcatcgtggaactacccttcacatttctcagctcgctagtctattggttgttgtggtacttccccgttggctatttctacgccccctcgcgcgcagggtacagttttctcatgtatgaactctttggagtctttgctactagcctagcccagctgtgcgcatcgctgatgcccaacatcgaggcagcctttgccgccaacggattcttcttcatgttttgtaacacctttgcggggacgctttctccaaagccagtgacaccctcgggttggcgctggttttacaatatctctcccctcttctatttgggcgagggtgtcaccgtggacgtgctacaagatttacccatccgatgcgagcagtcggaggtttcaatcttctacgcggcgaatggcacgacctgtggtcagtatgccaaggatttcctggaaattgctacgggatatttggttaatcccaccagcacggcggagtgtcaatattgccggtatcgcgacggacaatcatacgtaagtcctagtcaggagagagcaaggaaatggatctggtcttgaaactaatcatcagtagtaccaacaatacggctatgagtttgctcatcggcatcggaacattggcgttttcatcgggtttatcgcgttcaatttcacgatggttctggtgatgacctatcttaccaaaacacgccgccagtgatggaggatagattttggtctgctatggccacagtctcgaggaggggcatttgagttggggcaggttttcttgtttggcagtagaaaagtagaatagaaaagagaaatctaatttggatgagctgtttctcttcgaatcctttgcgtagcccactgctcggagtgtcatgttcttaattgtattaaactccaccttcctgctaacgtatatgattgacgtccaccacagctccgacttctcgatgatctttcttgatatagtcctttctccgtgcacaactgaattgggaaactaaattatacctgcacgaggaggcgcggcattactaccgcgacgagctagcttccttggccaatctagttttggaagttcaaccccgacttccccatggagtaagtcacaacggcatctcatatcaaggagccttggctacccagaccctaaccattgtggatcggcagatggcggggactggcttatgtgtatttagacaactatttcttcaggcaagttaaggttgtgagaatcttattctaactgatcggaaacccaatttttcctcactttgtatcattgcctttatttgacaatccaatccagcacaagatgaagctgtcagccgaggcaacggttatatctagagaagagggagctcagttgagctacgaagcctcatcctctcatcccagaaacatcaaagagcaagatttacagcctatccggcagattggcagtccagtaaggtgccctatcttcacactcgggattaaaacatcctctaactctccatggcttgctactagactgcgctgtgtatgggcgcattcgcaattgccttcacaactctatcgatgagtctaatggagtggcgaagtagagctattaccaatgcctatattggtaactgctttttcacagcgggcttgggcttggtgctagtggcccagtgggagttcgtgcgcgggaattcctttggccatacggtctttggagggtttggtgagcatatcgttccatcattctgccgtctttcgtgtatcacgaccgatatctgattaacgtcgctcccttttccaggcttgttcaacttggctttgggggcaatcaatgcaccggcttttagggtggcggatgcctttgaagacgttcccgccgcgttgaataatgcaatttgatatttcatgctaggtcagtcaccttcctgtgggcggccctttcttttccttttcttttttttttagctggggtttaggctaatatgaagatatagtgtgggggatattcgttctattctttactgttgctgcaatgcctatgtcagtcgatgcacatatatatacagatacccagtctaaaaggtagtcgcagctaaccagagataggaacctggtatacacgggcatgctctgaacatcccaaacctcatacaccctgttggctgcatcgtactcctcgttggccgacgatcatgcatctactggagtcactctgaagaagactgcgggttcattcagatttgtctcgggcttgtttgcctggtacacggtcggccatctgatgtgtcaagacgcactgctattctcttttcccttgggggatacgagccccttgtatatgcgattgcggagacagagaaaaagctaggtgttaaattattaaggcgaagtggtcagatgatctagaaggcctgctgagtgtacgggaaatgagtgaactttaggggtgtcggtattgattcctctttacgaaagtgattatgagattcaatagaagctacctcgttgtggaatacattatcaggatataactcaactgcgtaagccaaatcaaactatttgcatgccggagattctgctatacggaagaagcaatcagggctatcgttgaaacaaccctaactccatgtgattaatgagagttaactgagtgtgaccaatcaaaagctcattatttatggaccaatcaagatgcattcgtatcattgcggagcgaagcaataaatcatgaaaccaattagccagtaacaggggggctttgtgcagcactagaagctagaatcagtcacttcgctctgcaacgattatctcgaatcacctcgtagatgtatttgtcttgggccccgtcgtggaactctataatagcctttttagaaattaagcttaacgagactacctataaatgagcacttgatgtatttacgtatctatatgacgctttgaccatctagggaccacctcattgtataccgtgttcacatggtgaattctccaagcttttggaagatttttgcctcatgagggtcgaatttcttggtcgagtgggcgtacatactcctgaccttcttcaagggatttctcgtctccttgggtgcttggatgttgacatccacgccgtaagttctatcacagtcgtagtgacagattaaccatggaaaattatacaacaaaagtactatacaaccattccaaggaccttctagggctgggagcttggaaatattctgattagaaattccagagtggatccatggatgccggcccagatggacccacttattaccctttttaggcacgccatctccgtcaaatgattaggtgagctcgggaattcccgaagtcccactcggattccaaaaggagattcggagtttgtcagtcaaatggtaacctgtgattggtcagataccaaactgacaaagatgaatgtcccaaaggagtaatctattgtcaccaaaatgtcctcttccagcactgctcgcatttaaataactagctagggtcaggcaatatggatattgatacgtacgtcaacctcctccactggatatctatattcctaccttccattttcagcttagtacgactccattgggtagtggtacctggataactagctcgactttcaaacggctgactaagtggcactcgcttttcaccatgagtgtagacaatccgacgccgagtgatagcgtgctcgaaagtcaaaccccagatcgtgtggacgaatcaatcatcaaagctgcggatgccgagaaggacgcagccccacgccgagaaattgtaggcctccgctggctgctcgtctgcattgctgttttctcagccaatctgctctatggtttggacaataccatcgtggcagacatccagggtcccattgcgggtgactttgatgaatacacgcggctgggctggctcggggtgggcttcactttgggatcggtggttttcattctcccactgggaaaagcttacgccatcttcgacacgaaatggctctttctcggttgtttgactatgtttgcggccggtagtgccctctgcggtgctgcccccagtatgaatgccatcattgtcgggcgtgtgtgggcgggagccggaggagcgggcatgtatctggggtaagttgtaccacgacgggcagagtgcagagagagaagactaaccatgacaacctaggaatctgaatctgattactatcctgaccacccctacggagcagcctgtgtatgtgggtctggttggattgatctacggcaccggctgtattctgggtcccatcattggcggtgctttttccgatagttcagctacttggcgatgggtacgtgtggtctctttctagtttcctcagcgagtgtgctaaccgtaatgaatagtcattttatctcaatctggtcattttcggagtcatgtcgcccatctatgttttcctcttgccttccttgccacgtccagcgggcgaaggccgcagcttcatcaagaagcttgtggagctggactgggtgggaactctcctgtccgcgggcatgcacatctccattatcttgttcatcgtatttggtggtgtcgaatggtcctggacggatgggcggaatatcgcgctgtacgtggtctccgctgtctgcactattgccttcgtgctcagccagtactattgtgtggggaccgacaaacaaaaccgactgttcccctgcgagttcttgcggaaccctacaatgctcctcctttacgtcataatggcctgtggcggtgcctcgctcttcgtggcggtttactatatcccactttacttccagttcatccagggtgactccggcatcatgtccgcggtgcggctgttgccgttcgtctgcttctacgtggctacaattctgctttgtggttgggtcatgcccaagactggcttcttcatcctctggtacctggtcagcggcatctttattctcattggagccgtgttgatgtacactgtgaaattgggtaccagtccctccagcatctacgggtactctatcctgatggggttgggcatgaccaccacgcaggccgcctatgcggttggaccgaccattgtgagccccgatcgggtggccgagtgcctccagttcatgaacatcggccagggccagagtcaactgttgggattggctattgcaagtgccattttccagagtaagaccctcaccgggcttactaccctcttgggaaacaaaggatattcacatgcggacatccagggtgcggttgctggcgctcagagtaccctgatggagcggctgccccaggccttgaagacagaagctctggaagtgattgtgaattcgattagtgatgtctacgtgatggcgatttcggcgggggctctctacgtggttgcatcatgtctgttgcctcgccgtcggttctagaatctttcgcaaggagggagagcagcgagtgttgacgggatactggctttgtatctgtgattggggtgtcttagataatggagttttattttctcattcatttcctcgagcgcgaggtaagcctctaggagtgtcctccgctcttctagtttctagatcatcataatatagagcttgtgggttgaaaatctctcctggaaatagactagaatatagcagataagaagcttccgcgactcggatacagcagacaaagccttcttctagtcgataagtgttgcaagtcatctccatttgtcattgggacatagcaatttaccaatatagtagtctccggaactccgactccgcatcccacctagtactagtagagagataaaagacatatccggccttggccaagtaacttgcctccttcagctgtggtgaccctgtaattgaacttgcgcagtggtaattatatcatctatctcatcttctagaattggcgttgatatagtagtatagcatgaaggttttcgaacagccctctaaaaattgtccgcactgtagctatacgaaaatccttctgtattcattgtagaagatatatctattttagtacgtaaagtactggtggtgagcatgaaattaccctatctgcttcgagagtcaagaagccgatgattggccgtatgtaccttttatatgtaaatccctaagaaaaggtacaattacccaccaagcattacggcgtggtgaccttacccccctttagccggggcctatatatatctagtctttctcttcccatgccatcttctctgatgttgtagaaaataaagtcttatttcacacagctatctattattcagtcaaagtacacgccatggccaccactcttcccagcacctacaagcaagcaagcttcaaggaaaaagatgccagactgactctagaacaagtcccattgactctgcccaaacgtaacgagattctgatcaaagtgcaagcctgtggcgtgtgtcattcggaccactttgccgagacgaatctcatgggaggaggattgtgagctatcccactatggaatccatggaattccgactaatttccggttcttttatagtcctatcgttcccggccatgagatcattgggcgcgtagctgcaattggagcggacgagaccatctggaaggtaggggatcggattgggggcacatggcatggcgggcacgatggtatgtatctctattatctccccaaaaagcctggttcccctaataagactatactaatgcactgaataggtacctgtgcggcatgcaaaagaggttactttcagatgtgcgatcatcaggaaatcaacgggatttcacgaaatggcggctgtatatcccctttctcttttcatcatcactctttcgtcattccaacggaataatattaagctcacactccggtagatggcgaatattgcatcatccgtcgcgaagctgccgtccgaatttccgacgaggtcaacgctgcccaatacgcgctcctgctctgtgctggcgtaagtgtcttcaattcgatgcgccacatgagcatcccaccgggtgggctggtcgcaatccagggtctgggcgggctcggccatctagcgatccagtttgcgaacaaacttagctatcgcgttgtggcactctcgcgggattccaagaaagaggaactcgtgcggaagttgggcgcgcatgagtatattgacacgagtcgggaggatgctgtcgccgcattgcagagaatgggcggcgcttccctgattttgtctacggcgcctgtgccggagataattaacccgctgatcgaagggcttggtgtgatggggaggttgttgattatgtccagtaagcttctttaaggccgtttcaaggcgtttggttggatgctgataaatatagttgttcctggtattgaggtcagcactggcatgttggtgagtgagattttcctctgcttctctgaaaaccagacagaaagagaaaacagaagagatgcgatcaagatattaaccccagtttaggtcggaaagggtaaatccatctggagttggcctagcggccatgccatcgactgtgaggacgccatcgcatttgcggaggtacatgacatccactgtatggtagaagagttccccttagaacggtgcaacgaggcatttggtatgatatctccttcacttcttgggttcattttctctgacctgttgtccttcctacagaggctatgatggagggaaaggtgcggttccgcgccgttctcaccatggagtaatgagtctgaggacatattgaggggctaccaagtgcaccaagcagcgagaagagggagagagagtttaaattcctatccagggcagggcccggctcagtctgcactgggggtgtggtacccaagttgcggcctaaaggctcaatttccaacaggatattagggatgatttccattatacttgccagatagtatttacgaaaggcagagtatgaaagttgcgataaattgagtgtttgagtatttacttctccttcgcgctatgttccacgtaatattcttcatcttccctcgtagtcgccccttaacagttgcctaaaatgtcgcacgcgatcttctctgccagtgcatctacttagggttagagattttgtttgaagactatatactatatattataggacagaggcttacaaattgtggattggggatctggtggtaggaacggcaaggccgaggcatccactactcgcagggcgtcaacgccaatgactcgagctttggagtctaccactgcctgagtatcatttgccaaacccatagcgcatgtacaggaggcgtggaagatggtgtccaagctcctccggacatgatccagaatttgcttatccgtagtagcaccaaagtgttttattccaatccgcagggcggtatcgccaatgcctagttgagatccagcactatgaaggacacagtgtcggtggacgatcatcatccccaaggagtttggagtttcgggatatttcctttttcggaaggacccagataggagaatacgcgccgatgaatcaatttcaccctttggcaagacgcacatgcacgtgcatattctataagtatactgtgcagacatcctgttaattgtatatccgttatactcctcgctctcggtctctcccggagtcttccgcaatccctgcaggccttacgtagtaccgcgttcggaggtcctgcactggtatctaatcagagtagtgtggtcactgtatgcaagggaggaataaacagccagctagtcagtcgaatatagaatgattgctagagatctgtatttgagggggaaaagcccatcaataagcgttggtttgccaaacggatactctggtctctaagtgctactccaataccatccatcatggcgaaaattgatgtgcaccatcatttctatcctctggcaatgcgccaaggtcagtcccacgcatgttagagttagagtgagaagcctattggctaacctcatatagccctggatcgcgcaggaggtgatccctcgggctggtacactcccccctggacgctggagctagaccaagacatggcgcgacgaatgaaggttaccaccaccattctctccgtcactgcaccggggccatgcatcgagcctgattttgttaaaggagccgccctagcgcgcagctgcaatgaatctgcggccgccattagggactctcagccgcacaagtatggcttctttgcctcggtcccctctctgttcgatatggcggcggtcttgaaggaaatcgactacgcctacaccactctccgtaccgacggagtcactctgttcacccgctacggcgatggtcccaattacctgggtcatgtagcctttcggcccatctgggctgatcttagccgtcgcgatgccgtggtcttcatccacccaacccatccggtcgatacgcagctcgtcagtcaatggctaccgcagcccatgtttgactatccacacgaaacgggccgggccgctatggatctgctgactagtggcattttgcaagactatccgggttgcaaaatcatactctcccacgcgggcggaaccttgccgtatttgatctaccgggcggctaccatgctgccgttgatgccacgcactcttggtctttcaactgaagagctggtggcagctgctcggaccttctacttcgacacagccatctcatcaaacccggtcacgttgaaggcgctgttcgagtttgccgcacccggccatgtcctcttcggcagtgacttccctaatgccccgcatgatgcgatccaacgctttacggattttctcgaggcgtatgagctgccggaggagaccaagcaacaggtaaatagcggggcggcattagagttatttccacgattgaagaggatcccggataaagcgagactctgaaatggggtaggatcaatatggtagctgtacataagaagctattggtagggggttggagtcaaggctgatgagacaatgttgccgatgacctaatgattatttacatatcgcgatatgactttagtagtagaagtattggcaatacattatacaaattgcaatcgatggacctatcagtttccggtctgtttgtctctaaataataaactgggactttgttggcgttactcagagcaagcatagcttctctctccgaaaaacttggtaatgttctacctatcatccagattatccaactcggccattttccctcctcgatgaagcggtcgttcttttggggttctatatcaagcatagatgctccccatcagatgggtctggaagagccctctgtaggatatcatatattttcgttttatggtgagcagactgaactcactgtcgactctacaggaagagggaagtgtttccccaaggggaatcttagccggatgacacactcctttgggtaactgggtaactgggtttcttgaggattgcaagaaatctgcctatgcatcaacccctctccttgtcgatctataagtaagcgtacatatagttacccctcatctcgacgaagaaattcaacctgaaggattcagcccggatagatctcatcaactatcaactatggaaccactattgctgctactcctggtcttattaccagccatcgtagtcgtacgatatgccttcacctatggtcatcgtaccagcactatgcccatcggtgagttgtcgtcttcaatgttgactcagtgcggattttgctcatctggcataggtccacccaccctacccttcattggaaacatccaccagatcactaagaagtacactcatatcaagtatgtttgataacctccattttccctttggagcacacagaggagattctcaccgccgatgtcttgcggaattcaggttcaccgaatgggccgctcagtatggagggttatatatgctcaagatcgggaatggcaatatggccgttatcacaaatcgccgactggtcaaagaagtcgtcgatcgcaagagcggtatctacagccatcggcctcattcctttgtcgcgcacgatctcatcaccaaaggcaaccacctattggtcatgcactatggcgaccagtggcgcaccttccggcgactggttcaccaacacctgatggagtccatggtggaaagcaaccacacccagattgtcaacgccgaagccatacaactggtacgagactatatgatcgacccggagcaccatatggcccatcccaagcgatacagtaacagtatcaccaactcgatcggtaagtctcccatctactatttattgctggaagctcctaagtccctgtcacagtattcggaatccgcacggccaaccgggaaggatccaacatggggaggctttacaaactcatggaggaatggtcggaaatgatggaaacgggcgcaacaccaccagtagacctattcccctggttgaaactactaccacagtggttttttaacaactatattacccgggccaaggccatcggcgtgcagatggaaaccctctatgtcgacatcctgaacaaagtgataaaacggcgggaagatggcgacaataagggcactttcatggacaaggttctggatagccaagagaaacataatcttccctggcatcagctggcctttatcggcggtgtcttgatggaaggaggctcggacacaagctccagtctcacactggctatcgtgcaagcattggtccaaaaccccgatgtgcagcgaaaggcacatgctgagattgatgcggtggtcggccacaaccggtcacctgtttgggaagattttgaacaacttccttatatcaacatgatcgtcaaagaaggtcaccggtggaggccaatacttccactttgtttcccgcatgcactgggagagggtaggcctcttttctcttactttctgtccttttctgtcctttctaacttctatactaactatgggtatccttatagatgactgggtcgatggcaaattcctccctaaaggcacaatagtcgttatcaacacctggggtatccacatggatccatttcaacctgatgacccagctgctttcatccccgaacgctttgccaaacatcctcaattggctcccgactatgtgccggggacatgggagcgtcgcgaccactatggctacggggttggacgccggatctgtcctggcattcacctcgctgagcgcaacatgttcctggccattgctaaactgctatgggcgtttgacttccagccgggagagggcccgatggatagtgatccggttaatggataccataatggcttcctttactgtgccaaagactatccttgtcgacctgtagtacgcaacgaggtcattcgggctacgattgaaagagaatttgggattgcgactgtggatgtgttttctcggtttactgagggatagttgaaaattgagaggcgggatggccgcattcaaattatttttggagctgtgatgagcgacgagaatgagttgacgttcttttttctcgttttctgatcatttttgttttcaggtgctctctactatactaggtctataactttcaggcctagattctcacatcatcaacacagtgtttctaggctttcagcaacgtcaatccatttgtaaaaggtccactatatatccgcggcgagcatcccctaccaatatgggaaaggacttccaaaaaaaaaagatttctcggtgcccccttcatgggaactatgatgaattggcttgctacttagatacaaaaattattacactgatacctcatttgagatgccgtcaaactccagcccgtcctcttgatcagtacgttctatcgtcatcagatgctcccaatgctcgggatacttctgactcgcccatttctccacttcatctttccagtattggtacgggatggcgttgtagaataacccgatactaggacagatattagcgatgataacacagatagcaaaggaatttactcacgtattgctggtaggagggatcccgatctcagcttccatgttgtcgatagcttcaacagccaggtcaaattcgcattgagctgccaaggcctccatatacgccgaatagagcgggcgattcgcagtgatctccagtttcttgaccttgctcatcatctttatagcctcctgggtaccattgtgatgattctcacagaccttgaagaaaatcgtgatagtcttgtgacaagggccttcctccgactgaagaatctgtcggaagatttccatgctcttttctggcatctcgcatgcagcatacgccatcatcaaaccatttaggattctcgtgttgagatccacctcaagatcaagctttagcatgttgtgtacaagctttagattggttgcatctgccgtgcgagccaggccctggaaacagcgggcataagtgtctggcctagggcgtcgaccaggttcatcggcctgacgcatatgtccaaataccaagacggcaagatcactgcgcttccggttgaagaaggaggtcatgattttggtgcgagctgagacccacgtttccgggaatgcgatcttcagaagctcgtatgcattccacacgtcggtgtcggactggcttttatccgtaatgtactctgtgagggcgtcccgtaccggcatcttttgttcatcgctgtagctgcctagtcgtggacgtagcaactctgaaacggcgtcgaggtcgtggcgataaaggagcatgtgagtcaatgcggcaatggtcgcagactctaggcgcacgttctcttggaaaagcgggtctaggagggaggatatctggtcgaacaaggcatccttttcttcggatcggcagagcatcgcgatgagcttgtttgcgattggcaggttgtgactcgtgagggaagtcgtgtcaaccttctcttcgagaatcttcaatgtctcatcgacatcgccggcctgtatacaggactccaattctaagatatgagtttgactatctgggacaagaccccattgacctgcgagtcccatgaaatcagaagccaactgcgggttctgcgttgcgttcgcgtactgaataaggttattaacaatgtgaatgttgatggagccctcaagctgcggattcttcgtagtccatgaatggactctttgcgcaagagcagaagcattgttcccctttgctgcttcccagagcaagattatgccaacggtgtcttcgctgggctcattagggagggacttgaagatctcctctgctgaatctgcccgcgaattcaagagataatatttgatgagagcctctctcgcagccatggagggttccgagccatcagcaatcggagagtcgtagacagtttgggccgctttccattgaccgtggtcgacgagaaatgtaactagctctccatgcgaggcttgatcaaatttattgccatggtttccccactcatcaacaatcttccgcacctgtcgcagatcgtccttcatggcaaaccctttcataattgtgagccatggcgacgggacagccttgctcatttgaccccagaacttcaatagggtatgtctagcatcctcgggattaccattcatagccaatatattgatatagagaccaagggccggccggctgatcttccccggaccaaatccatgatcgaggtttagttcttgatatgcatatcgggcaaggttcatgacaacatcacgagcctgtgggacacactctgactcggagagtacatccaacaacttttccaaattctcaatcgagaaaacattctgccagtcttcttcttccatctcgccctgcagggcccttaaatgtttgaaggtgacgatcagcgcgcgggcttggaaatggctgatgagcattggcgtttcaagccgcatggtaaaaaacgtttggaatgccttcgcaagaatatcactcggaggagttctgcttcgatctttgagtgccctcatcaagtcagccattggtttcaggcccttttcggagggcaaaatagattgcgaccgctcagggtccgagctgaagacaaagatgttgcgtcgcgaggtataaggaaggctggacatggcaggtcgtactcgggcaggagtgattgtgtgcaataagcgatttcgatggcattgggagaaccgaagtggttcattgttaatgattgcccggaagacccgtcttgtgagatgggattgcattatggattatgtgagctgagcttatagcccagatagaacaagatgaattggataaaaacgtgtagtccgaagttgactcgcaatctgcatggaatcgtgaaaaatgggggttcgcgacgcggagagatttggaggcggaagaagtcttggcgaaaaagatctcatctccgcgttgcccggtctccctaacaccgtcttcaacatcgacaactaatcagggattgaaaggtcaagatgtctttgaacctcttttcttcaccgtcattgctgcgcaatgtcgcggccacagccaatgttggcctgtcgctctgtcgctggagctcgaccgctgctatgagcgctttcacttctcagcgcgccacaagctcacagagtatgtgatcaacccgatacaccgagcttattcatttttgtccattctataatttgggaacacatttatttttgggtttgcctagcgactaatgtattgcgatagcctcccaaatcgtccaacgacgccgtttacctagtcgtctgaagttcctcgaggaccagaaggcgcaaggcgagagccgagcccttgagagatatcaaacccgtgacttcaaggctggagatatctacgccccgcacgatctcagcccggccgagatgaagaaatggggaaagcgccagtcccctcagacagatgctttcgatgcattgaacgtgaatcctatagatttgtacaaggtatgcattcctcgagccaatggagctatatggaggatataccatcatgaacagccactaactgttcgctcttttgccattacagaacttctccgtcatgtccgaatatatgaccagcatgggccgtatcaagccccgagccattaccggtcttcgacctgtcaaccagcgcaaaattgccaaggcactccggagagccatcggcatgggccttatgcctagtgttcaccgacaccccgaaattctcgcagccgagatgcgagcacgcatggagggccctggaggtttctaagccgaacatactactttggagtcattttttgggatctgaaacaaatattgggagatttccttgtacaagtacaggccggtggctggtagaaagggcacgacttggtgtattattactcttagcgctatgcattgattttattgagagctactactttcaagttcttttgtgctagaatatttgaagctatcagatacattgcagatgtgttgacagtgatatttctcttttctgcatactcccaatgcttgttttaagtagacaaggcgtggcggtgttccccgctattgtggcccgtacgtcagtcgataaacagtggactgtggactctcctctgctttcccccaactcctctgcttgagtgtgtacatcttagcaatgtcacttacaaatggtgagaacctgtcaccctcatattatatattattgtcctgacatattccaagagtccatttgggccgctagcccctccaccacccgcggccagcccactcagctttcttctgatgctaaaggcgagcgattggcatatgcagtatgttattctaacaatatctacaatagtacactgcctcgtcctgacatcagcgattatagtccaacaaatccatcttcctacgttcgatcgatgaccccgcagtcgctaggcagtacaccgaacacaaggcgcagacaactgtcgcacgcttctccccctccggcttctacgttgcaagtggtgacgcagctggaatagtgagagtatgggattgtgtcggtgaaggaatcaccaagggtgaatatagcattgttaatggtcgaatcaacgatttggcctgggacggtgactcccaacgcattattgctgtcggcgatggtaagcagcgatatggacactgtatcacttgggatagtggaaataccgttggggagatccacggccatacgcaacagctcaacaccgtgtcaattaggcagcagcggcctctgcgtgccgccactgctggtgacgataagaagacggtattctaccatggaccgccgttcaaattcaacaacggaattgctgataagcactcaaactacatatacggagttgcctttagcccggatggttcgcacttagtcagtgttggcgcagaccggaagatctggctctacgacggcaagacgggcgagaccaagggtcagatcggtgaaggagaacacactggcagtatctttagtgtgtgctgggccaaggattctcgaaagttcgttactgccagcgcagaccggaccgtcaggatctgggatgtggaagctggcaaatcaacccagacctggaccttgggagaggagggtgctatggctgttcgtgaccaccaagttggcgtggtctggcccccaggaagaactgataacctgctcataagtttgtccctcagcggagacttgaactacctggtcgagggaactcctgagccccgacaggttatctcgggccaccagaagagcatcacctccctggcacagaccactgtggataacaaggaaactctgtggacaggcagctttgacggaagagtctgcaactgggatgtggcttcaggtaaggccgaggagattgaaggagatgcccaccccggttacgtcgccgggcttgcaaccacatcagagggaagcggtagaatttacagtgtcggctgggacgacaccctccgttctgttgacgctgctgctaaaacatatacgggcagcgcttcaaagctcaatggacagccaaagggtgttgcggctggtgacacgaccgtgcttgttggcgaagccgaaaccgtcgagattttccaagatggcaagaagaccggagaatacaaaacagactttaccgctacaaccgtggccgcgcatggttctcaggcagctgttggaggcgagaatggatctgttcagatctgtgctatttcgagctctcggctttctccccgggcagacattaatgcctctcgcaatccaatctctgctcttgccttctccccagacgcctcccacttagctgtgggcgacttgcggggacgtgttctagttttcaaggttgcagatggcagtctagttacagaccgttggacggcgcatactgcacggatcacctcacttgcttggaatgaggctggttcacacgttgtgagtggatcactggacacaaacatctttgtttggagcttggctaagccaggcgactggcttgagctgcagaatgctcacaaagagggtgtccacggtgtaggctggatttcaggaggctccaagatcatctcagctggtgctgatgcagcggtgaaggtgtggaaagtagatgggttgcaataattatgaagtactccgtagctgtcacagtattttcctacgaaattataaacgtcgagagcttctctttgttgacaaacacattcgaaattagcatcgagtctattaatatcagaaatgcattctcgtaactcaagtaactcaagtcccccgaattgtacacaaagcaaaaagcaaaacaaagaggtgcgtggcaatgggaagtggggagtgactgtaactgtcccagccagccaacaaattgacctgcatagctcctggcacctccccacaaccgtctgacgtcttcataaagcctggatagaagggcgacttgtcgaagatgtgccatggggcttgtacaacgccctaagtccccgcgaagtacgtgaaacccgaaagatgccatctggaactcccagcagctcccgacgttcgcgcccaacggtatgtgctcgcagtttttgacttggaagatactaatcgtcggtgaagctccgtcaggctacatttgtcctcccaaaaacaggccagcgcctgaaaggcctcatcaacctccgaaactccacgcctgacaacaatgaggaaaggcgcgggctcctcacaaacgagatccaacattatgagggctacctcgactccctcacgcggcgtatacgtgataaatggacgcagacaaatcagtttgttaggtcggaaccgggtattggagtcttgaagtacagtcttgcgtatctggtcggatctctggcaacttttatccccgcggtctcggccatgctgggccatcaggatggaaaacacatggtggctacggtgacggtctactttcaccctgccagatcccagggtgcgatgttcaaggcctcgatctgcgctttcctggcgttctgctattctaccttcttgactattaccagcatgttcgtggagatgtttttccaggacacattggaattgcctgcccttggtcatgctgtggtcctgatagtattctgtggcggtgggcttggctttgtcggttggaccaagcaacgactgggagatcctctggtgaatgttgcctgttcactcacggctctgtcaacaatcacccttttaaccaaggagggttctgtacaaagcggtgatttgtctctttccaagatcttccaagtcctaaagatggtcgtgatgggcgtggtggctgtcatgcttgtatcctttttggtcttccccatatcagcgcgtaaaaagctgcgctcaaacctcgtcaccgtcaccgatacattggctatcatgatggcacttatcacagaaagcttcttgagcggatctgaggaagtgcttctctcggctgaattcgttgacgcagaggcgaagcaccgcaaggcctacagccagctcgacaggctcgtccgagaggctaaacttgagcactttgtggcaggcactgaaaaggagtacaggctcgaaaagaatctcgtccgttgggtgcaagatattacccataacatgggaggtttgcgtaatgcagcttctctccaattcagtttgattcgtgagactattgcccatgactctgtgtctccggaagatcagcaaggtagctcgactcatgtggactatttcatgaccctggagcggtcctggtcatttcccgaagggtcctttctggagcctattgttgagcgaccagaggaggaactatctccagtcagctcccatcaacttggaagtactgaatcaacacccagacccacgcttcttccagcagatgtcttcactgtattcatctctcatcttggccctgcaatggtaagttgggactcaagaagtatttgatataattcaagactaactagaagcagcgatcgttggctttcacattgaaagaaatctttaaggagattccatttgggcctgcaccggactataaggtctcagtgaatggtcgactgcgaattagtcttgaccgagcgcttgatctttacaaagaatctcgcgagaagacactcgcaaccttgtatcaacaaaaggaaaccatgaaattgaagtcccgtgaagctgaagccgatcttgaggaagtgtcagctagctgtggccatttcagcttttcgctcctcgaatttggggagcagctccgagagatgctttctatcttggatgagttgcagttggaagtcgaagagcggcccaatgggcgaacctggtcgtggcttaaagtttggcggtggtcgagaaacgcggaggccgctaaaatagcctcatttgacgatggtacgtatgcatacaaatcgttgagacatggattatatattaattctctgcagagacagcttccaatccaaccggtactgggcaggactcccataaacatgctaggcatgcgtcagacggcttgattgcacatgatacactctctgtcaatgtccaaacacgaaaaggcccttcggcgaatgaaacaacaaagcaaaggctcggttaccgtttatggaaatgtcttggattcttccgacgagatgatacgaaatacgcgatcaaggttggggcaggagctgcactctatgccctacctgcttttcttccttcaactcgcccgttctatgggcgttggcggggagaatggggtctgctgtcctatatgctggtttgctcgatgactatcggggcctcgaatacgacggggtatgcccggtttctcggtacttgtttaggggcagtcgccgctatcctagcatggaatatcaccgctggaaatgtatttgctcttgcattcttgggatggataatggctgtctggactggatacatcactattgttcgtgggaatggacccatgggccggtttatcatgctcacttacaacctctctgtgctctacggctattccctttctcggaaacaagcaaatctggacgaagatgaaggcggttctcatccaatcatggccgagattgcactccatcgagttgttgctgtgttgtctgggtgcatttggggaatcatcatcactcgaatgatttggcccatcagcgcaagaagtaggctcaaggagagcctaagtcttctctggctgcacctgagcctggtctggaaacgcgatcccctatccatcatggccaaaggcaaaaagtctgttttatacatgacgccccgagagaagcttgagattgaacgatttttgtctcggttggaatctctccaggctgcggcaggctccgagtttgaactgaagagtgcattccctgaagcctcatatgccaacattgttcgccgtacacgcagcatggtgaattctttccttaccatgaacatcgagctgatgaagaataatgtggccactgaaggtgaaatcagccttcttcaatacacaaaatcagaacggctgcagctatctgctcgggtgagccatctattatcaggtcagtcctcttgtaacttccttgtgcacttgatgcggcgctgattatcttccagtgattgcttcttcgatgaaactcgagtaccctatgagtgatgtccttcctagcattgagcatgctagagaccgattgcttgctcgcatctatcgctatcgcctggatcatgaagcatctcaacagactaccgatgaggactgtgctttgctttatgcatacagtgagtatctctttggtttctcgtcccttccaccagttcaatacactgacccttgtccttctagttttggtgacaggccaattatcgaatgaaatcacggagatcattgcagagatcggacaactgtttggggtattaagtgaagatgtagtgcagctatcttgaaaatctagctgatcaatttgaaaagccctcaaaataacaatgtagagaaatatatgtaaacatacaaggcaacactgctaagtttggcgcacatcgatgtatccgtttttggcgtctggcggggaaccgcaagtcggaacctccccttccactcaaacccatcgccatctctttcattccatcaattttcatcttcaattcatcaggttgtctcatgaaaacatactctcttcccctatttctagtttgaaccctagaatcctccttaatgaaggcgtaggtgccaatattccctgcccttcggcgtcgcccgtcgcgccctcgcgagttcagcaaccatgcagattgatccggcggctctgagtcggagtgactctgtctcaaatccaaagggcaccgtgcccaatggctcagtatctgcgaagacctccagagctctgatatcggtgccgcgactagagctcgagcatgcctacacggacctgaaggccgccatcggagacaagtgggccgaatataaggagtctacagctctgttcttactaggtatgtcgtgatgcgcatggggtttctagttaaatggcgattgcttgcgctccgcggagagtgtttctcccttccctcctatgtattggcctctgttcgatcacctcctaacttcttgcctgatgataggacactacaaccagcgcgaatactcctcacgcgtcgattacttcttgtgcgccgatcctaaaaacgagcatctacataacaatttcgtatgcgcgctcatcggaaacctcacgcgagacctccccgatcacggcgtcgcaaactgggtatcggccaacgacaaaccatccacggtgtcgaaacccgtctccggagatgctgcggaacaaagattgaagacggaggttatgaaactacctccgagggaccgtcggcgcataaagggaatcccagaggtgcgtagtcgcaaacgatgactaacaccttcacccaagaacccgacagctaacgatcaccagcgagatcccaatgagaaggtgcttacagagcttgaagaaagctatttagctaagcaattcaaattacccagccaggttcccgcaagtgcaggcggcttgaacaaaactagtacggcaacactctctccgttcctatggtcaattcaggaaataatccctaaccatctttctccattacagactgggagctggaaatccgaaaacgatatgcccagccgctagccgcagaaacaggcgaattccccgatgccgaatccatccatgcccgcatggtcccgatatgttacgaagaatctctccccagcggtgctgcgctcccatgtgctgagttcatggcaattgcgacggaaactttcgtaaaggaagtcttgtccgcagtattctcgcgcacccgttcaaatggcccatccggtacaatcaataacatgatgatgcgtcaataccgacaccaactagaagttgaagagcttgcatacacacgtggggagatttcgaaggattccgccacaggcctactccccgttgaagcgagagaggccaacctccgaaaacccttaggcgttagagacctgcggttaactctggagctgggcggcggtgtcctcggccacatgccgctgattgtagaccagatcatgaacagttacttcgaagacgaactcgagaccgaaagacacgatcgaatggagaatggcgctggtgaaccgcatcaagaaatcaaacccgaagacgagatggacctggacgaagacgaagctgaagacggttctctgctagactgggaaggcggcacgcttggtgatcgagctcagttgagctctttgcttgacgagtgtctgtccatggctgcatgagaattttatacccccaatgtctttttttccccgtttcatacatgctacattacatgctttttctgttcttctttttttttttttttggcttcactcacgatttggatggtggctcacggcgtctgggtactaccaagggaggctgtcactgtttgtggcgccacattatttgcatatggatttggagtttgaagatatattgtcttatccgttctcgaccgcccctgccttgtcctctatattcaccttcctattttggtcatgtacagtatcacttctcaaggacaaggtcaagcggtcgatatctggaggattgaaggaaacctcgaaaacaaagagacgtaaaaaaaagctgaatggccatgacctctgttgggaagaggaggtcttgttcgatacccatgaattctactttacaacttggttatcttgagaagttattacatatttttacattaggaccctgaacttcttgacgtgagtcttagcaaagacagacccctgtcaaagatgaattccatgggctttttgcccccgagacgcctgtagatagtacaccagaagactgtgctagctagttgatgatattcgcgacaagcttcagaagctcctcggtagtcttgtaggcattggccgggtccttcgcgatggactgccagatctcaccgtgcttgggttccattgacatgcacttcgacacgacgtctgctcgtttttcctgtaactagatgtcagctggatattccaatgataacgataacacagagcccaaagagtgaatgaatgaaaaggggagagagaaactaacctcggtaccatgctgcataaggaacttgtaataccaagcccagccatcaccgtaatcactatccaagacgatcgccttctcaaaccaggtcatggccttctccagccgacgctcgccccagaagatacgcgcaacagtgatgaacagaatcgggtcgctctcgaccttcttgatagcctccagactgcgtgccttgcgctgagcgcggggctcgagataccagatgctttcgctccacagaagccccgatgttgggacgtcctggatcgcgcgcgccatgaggactctggcctgggagatgttgttggcgcgacgttcaacgcgcacactttcggtccaaagctctgcgttcttgggaacggccaagcgggcccggtcgaggacggatcgggctcggaccacggcgcccgctttctcttccagtcgcgaggcaagtagccacagcgcaacggacttggggcaggcgcgggtgcctgttccgtatgcctcgcgcgcctgcgggagcttgttttgcgcttcatagatttggcccttgatcatccagagcttgtcggccttcgggaagagttgcagaccttggttgactagatcaagagcgtcgtcgatgttgccgagctgccgctcgaaagcaacgctcttggtccacacgcgatctgtgccagcttcacggcgggcggtggccaggagctctcgggcttggtctggctttttggcgtccgcttctagcttaacagcagcaagccagatatcttcattgttagggttttggttgaaggcacggcccaagactcgtcgagcatcgtcaatatctccagattgccatttctccttggcaaggaggagccagagctcctcgctttgagggcatgcttcgactgccttctcgaggacctgccagagagcttctttggtgccgtggttgcgctcgaggtccgctgctgcgagccagattgatcgacgattcacaaagactcgcagggcgtaagcgtaaattgcccgggcagtttcgtagttaccacgggcaatactggccttcgcgtcgtccatccagatatcttttcggtcatcatcctcatccaggccccatccgagagtctcttggatgatactaccacatgtaagaacggcgccttcgctttcgcatttctcggcttctgtgatccattcctctctctttagcatagcgttctctcggaccagggactgaatagcacgcttcatgacattgaccctagcgaatgtacccatctgttcctggagtcgagctgcagcaatccagatttcgtagctggtaggaacggccttgcgagcagcgttcaagactttttgggcattttctggggtttcaagacgagcaagggcaagccacaactcgactgagagaggaatgatttcaacggcctttgccagcagcaagcgcgcatcggcaggatcgtcttctaggttgacagcttctttccaaatctgcaccgattggggaatgtgtagaatagcttgtcgcagaacattctttttggcacgggtgtccgtttctaatctcatggcctcggtccaaagtcttgtggaacggtcattgtttttaattgcattcgctgcaatgatctttgcgttatggccttcattgagtcgaatgttttccagccatgcgtcttcacttttggggcagagctcgcaccctttcgcgattaggttcctagctgccacagtccggccagcaagctcctctagacgagctagcgcaatccaaccgggagcatgtttaggattggtcttggtaactgactctaacaaggtacgaactcgcttgatatcgcccacctcaacttcaccagctttggcttctgattgtgtcaagctggtgagataacccttcgggtcgatattcgtagaggttccggatgcagcctggtcaagtcggaccttcagcactttatcgcgcgccgcaccgatatctgcgaagttcatcatgttactgtcggcgttttctccttcgtcgacagtcgtttccgtgccatcttcggcaattgtcgtgccatactgagctgagtctctcgcgccagcaatgacactatccggaacggcgtagtgccgctgtcgggcgttctgtttgtctcgtcgattcttgcccgtcaaatcaccaacctccgggaggttggcccattcttcttcggataccgaggcgagggtgcgtttcagatcggcaaattggtgttgaattttcgggttattgcgttcgtattctagctgttcggctttctctcgagcttccctgtaggtagagagcgatttaagtcggtattttgtccaaacgaccagagctaatccgataaacaaatggtttcggaggtgaaaatgggagggggaaatgggagggatatgactaacctgcgagctcttcggcgcttgtccattttctcgtctacctcctggtaaatacggtctgcttcgtcgtcttcttggtcgaactgcccgtacgcgaacagcccgacctcgttgtcgggatcctggaaccgctcatcttcctcctccttatcctcgtcttttccacctttctcgcgtgaagtggcgccgtaggcagtgggtgcagcagcccctagaagctgagctctcttggtgagagcagcttggatctgttcgggcgtaggtccctcacgcgccgggccaagatcagagcgagtggtgaatcctgtcgcaccacgacctagaccagcgacatagttttcaggcgctgcctggcttaggaaatcctttcgtccagaagccatatcgagcacaacacaactcaaagagctcgacgccgacggcgcagaaggcgaaggcgggctcggggaaatggtattcccggcgccggcaatcttatcgcaaaaaaagttcccgcccacattgaagtccatggtggtttgttgccgcaggttttctctcttcttgataattgtgaaattacagaggattccaagatgccaaaggttaataaacagaagcgcaataacgcggcttcgcagggcctgtcagatgctgccgccaagacaaaagctgcgcacagcatcttcaagatgaacactgatattggccagcacgttctgaagaaccctggtattgctggtagggacggattttcactgcactataccctactctagctaacaggtatctaactagctgcaattgtggaaaaggctgagctcaagcaaagcgatgtgggttacaaaagacattcattggcttaacaaacactaagagtgtgaatcaacagatcgtcctcgaaattggtcccggtactggtaacctgacagccaagattttggaaaaggcgaagaaatgcattgctgtggaattggatcctcgtatggctgcagaagtcaccaagcgcttccagtctactccataccaaaagcgcctagaggtcattcttggagatgtgatgaagacggagctcccatacttcgatgtctgcatcagcaacaccccctaccaggtatgtacagccccagattttttccaagggttcttcccgggtctaacagagtcaagatctcttctcctctcacattcaagctcctggctacatctccggcgccacgttcatgcattctcatgtaagtctccgctagcaaggctagaagctaccagagatgttttgtgaaattgagagcttactcgaaaccttccacacaggttccaacgtgaattcgcactccgtttattcgccaagcccggcgacaaactttacagtcgactttcagtcaatgcgcaaatgtgggccaagattgatcatatcatgaaggttggtaagaacaacttcaagccaccgccccaggtcgagtcaagtgtcattcgaatggtccccaagaacccacggccgcagatcaactacgaagagtgggatggtctgttgcggattgttttcgttcgaaagaacaagactctccggtccagtttcattagtacgacaagcatcatggaattgctagaggcaaactatcggacatggtgcgcgcagaacgacatcccagtggaggatggcccggttgaagtcgccaatgacgatcccatggcaatggacatggaggagcaggaggaacaggctgtcgaagaaccggccgacgaggtcatggatatggacgacgacgatgttcctgatttcttcaaggagagcacaaatgcccgcctcgaagcagcactcaagaatggagcttcgcgcaagaagcgtggcaaggttgcagagctagtccgtgagaaggtgcgccaggtcctggaggatgacactggcctcggagaaaggcgcgcgagaatgtgtgacgagaatgatttcttgaagctgctctgggcattcaaccaaaagggcattcatttcaactgagcgaatacagaccaagtctgtcccggggaaaaaaagcatccgaaaatagaagttgggaattcggatcatgaattatgattactatcaataagagataccattgtcaggaggttcatcaccagcaggccggaggtgagcacgcgagtcttgaaacaggctttgccagatgaatgcttcgctgagtaagagctcaatgtctttctcggtccaacccttcgttggcaatgcttggaggaacatcatcacctcctagaagacgttagttcctgtttactggtgacgatattcgattacaacatcgtacctggaaatccatcttgaccaattgatctgtccacttgaccaagaatgcagcgcagacatagaggtgaaatcgagagaagccctgctcctcagcctagaataacgatcagtatcatgccagacagtccctgggagaaaacgtaccatgtatgtgtcccacatgcgtatcgtatttttgatgctcatttcccgcatgagcaagcagttcatccatcggaaactaaattgcataaattccacaccttcttgttccaggtgctttgcgagtgctgcatcgatgcgcactgtcaagtctcgtaatgccctgacctgtcggtgaatgccaggctgggcgtatatgtagttgtcctggataccgtcaagaagcttcgtcaaacaccagaaggtgtccgcttccaccgcatctaacacactccgaggcaattggccagggtccatgccttcttcaacgttcaaatcggttatgtaaacgcccaggaagacctgccagaatggtgtgactagatcattgataccttgaacataaccacttgctgggtgtcggatggcccagagataaaggatgcgttccaacgaccgctgggtggcttcatagccatacagcggaatgtggggactggtgcgtggaacatcaatgctaatctggtgccatactgcctcatcaagtcctctgccgcggcccttgcttgaagaggggtttgccgagcttgccccactacctcggtcaaaggcttgccggattccatcaaggtattccttgcgctttcgttccagagtggagatgcgtcgctcactatttgtaggaagatagccaaggagaagctgccaagtcattggccgcacttcttctgggacgcctgaccaagcgagatcccgcagctcagtaggcgataccgtgctcgcttgcaagatgcgcttgaacttgttgatgcgcgtaatgcgactcgaatgaatgtccctctctttgggtgaagcatctatcggaggtggggagtggttgatgaggttcaaagcattagcaggatctataactgtcagcatggtcctaattttccagtcgcctcatacataccatgtaggatgtccttgtattgaggccgaaggatctttccctcccccttgcgagcagttggatacatcggggcaccacgctcttccgcaatatctgaactatccgcgcgatgtctgttggcggctgctaatccatacccaagtgtcgaggggttgccaccactgaaatcaatattctgggccttcaaaggcgcggatctttttctcctcatactagcaagactagggagcccgaattcatcctcatcatcatcgtacacaatctcgtcctcctcatcttcttcttcgtcttcttccgtggggtcgcgactccactcgtcgaccccgtcggccataatgccagggtagagttgtcggggaggtgaggtcaccatgttccctgacttgcgagccgagtttgatgcagcatttgtagccgatgtcttcggaggtgttctcggcgctgagtgggaggaggtaggtctgccaagaagacacttgtcagtcatcgtttctgataaattgtctggatatgtagaatgtatttctagcatactgtacaatattggcatgtgagtaggatgcgcccacaacagtattcgagccatagagcttcgacgatccctgatttaggggcgtacttcggccagcccagaatggcgatgcggcgcgtcttcaaacaacgttagcatccaacatacaccacagctgttccatagctgtaggagagggtgtatagagctttcacttactccgagttgtctgcaaaaaggggagaaaggcgacgtaagctatagctgcgattgaaatgcaaggggaggcaaaagacacgaaccaacctggaccatttcctagggatacagtcagttcaatatcctgcgacacaaggatcgaagaaagccttcgaattgcgacaaaattcatacctgttgcccttttttactcgccatcgtatgaggattcagaggtgtgctcatgcgggagtctaatacacgtgcggggtggcactgtgataggatgaatgccgtatatcatgcaaccaggccatgtaggaacggaataggagatcaatagaccatatttgggagtaatacctaggcaaactcgagttgaaaagcaaatcaaactaatattgtaggttctaaccacatctagataccaagtgcctagctttcgccccgactccggcgtgaagaacgcattatgtaagcaatgcgcttgaactcccgcggtgctggacttcctaacttcttcttccgcctgctctcagcttttcgctgtccagttactttgaattttgctctctgatttactaaggctacacgcgtttccgcgactatctctgcttttgctttattcaacgctcactatttaatcatggctgaccctgaggatggagatgatctcttcgctgatctgtatgttttctacttcactttaccttgaataatgaaattctaatcaggcttctttcatagctacgacgctgatgattccaccaatcgtaccactgcagtcgaggcgcccaagcctactgatctaggcgcgaccaacttggctaccactggagactctgctcaggatttcagacctgaccctgttggcacatacgaatcgcaccctagtcagccttcggaatttgacccgggttaccacaatggttctggaaatgcttatggtgcccctgccactagccaggcaccccctcctgccgagaccgagtctcacggaacaggaattaaagaagacgggtaagtccactaattgcgtttcttttgcattttcatgttcgaactctaccccaactgcatgtatccgtctggttttgggctttacctcgtcagtacaggcctgggtcgcgcaattgctattcatgggttaagtctgggtgccggaaggagtctcctatctgcgggttaaaatctctctgggatgtgggctgttggctgtttgaggaaaagtccaccggttggttgacggcgcacgcgttttcaaccttggaaatgagggagaacaaactgcgggctcggcgaccatcaagacgtctgttcgagggacccattcgcacaaccaccaacgtctaccaagggtgatctacagatcatattgggagtgctccagcatttgctacacggaatcaagcagaggctcgaaagaaatatcgcctgggacccttgatcaagacaatttcttgcgtgaatcaaccacaccccaaccatggacctttgtcacaaacgattcatatatagtacagccgatactatatagtttcctgtcgatataccttgatagggcagagcaagaagtagctatctagcttgagactctgtgttagacaaggcaaaggttttcacgagtcagacagacagacagtgacaattcactttttacgactgaaatacttgcacctcctcgcttctcatctcgcctgtctccggcttgagaaatccagaaagagaaggacatgaattctgcatccaggcccatgtaaaccagtgggcttgacgttaaatccctgtcatgaacatcaaaattgctcaagaccatacaagtatacattgacagtgactacgaggcacaaagatcacgtaccggccaagcacgtgcgctgcttgttccagggccgttgtgcccagaatagcgaggcttttcgtgcactcgaatagcccatgaatagcactacctccccttaccttttcacgttcatttacttcctttaccctaccacattacatcctgtcgttcgccgatcataattggtccggacatttgctctttcattttcatgaacagtcgctaaccgaggacaacacgtggttagaaagatgttcatcggtggtctgaactgggaaactacagacggtaaatctatctttcttacacggtaaatgtatcatatagctgacatatcttgaacgtcatttagaatccctccgtgactacttctctcagttcggtgaggtgcaagagtgcactgtcatgcgagatagcgccactggacgctctcgtggctttggatttttgactttccgcgacgctaagactgtcaataccgtgatggtgaaggagcattatctggatggaaagattgtaagcatcacctcgcaattgggacaaacaaagtgaactgttactgaccacatcaaagatcgatcctaagcgtgctattcctcgtgacgaacaggagaagacttccaagattttcgttggtggtgttagccaggaggctaccgagcaggactttaagcaattcttcatgcagtttggccgtgttgtggatgccactcttatgatggacaaggacaccggacggccccgtggattcggtttcgtcaccttcgacggcgatgctgccgttgagaaggctctctcccgtcctcttgagattctgggcaagccaattgaggtcaagaaggcccagccccgtggcaacctgcgtgacaacaatgatcaacgcggaggccaccgcaacggaggataccgcgaccaaaaccagaacgatggaggtcagcagcaagcccctcagcagggacagggtagttcgatgactcctcaaatgatggcccaatactggcaacgcatgcagcagtactttaccatgatgcagcatcagatggccggtcagggaggaatgcctggtatgaacatgggcgctatgaacatgaaccccgctatgatggcccagatgcaacaagtgcagcagatgcagatgcgtcagcagcagcaacagcaaatgggtgcccagcaaggtgctatgagccccggccctcagagtcctggctcccagcaggctatgcccaacatgatgaacccggccatgatgcagcccaaccaagccgttgctgccggcggtcctgccagcgattccgctagccctgtccccaatgccgttgccatggccgctaactacaacaacggaactccaaactcagccagaggacagactggacctggatacaacgcgaccgagcagatcgccttcgagcagcagaagtatgaacagcagcagatcagccgctcgatggatcctcgcggcttctcgccttaccagcagcagggtggcccaacctcgtgggagggtatgtacgatgaagttcctcaacctcacgttccgactggaccagcaggtatgagacgcatgggaagttcgggtagtggtatgtgattcttacgagtctttgcatattgtgtccctttcatctcaattcctttccattcctactttatttgcgcacatcaactaacccgtctctcaaacaggaaccactcctcagccccagagcactgctcccgccaatgctcccactggaccccgcaacgccggcaagcctggtgcgaactaccgtggcggcggccgaggtggacaccgtaccttccacccttaccagcgctaaagtgtcgttgttgctccttcaaatgatgcatctagtcgcttctcgtttcagatacgatttcgtttcttttatgtgttttctaagtctttttttacctgaggccagcgattttgggcctcatggattgttaattgcgtggccgccagccgccaaggtgacgtggaaaccctgcgagctggttgtattgacaatttccataccctttgacttcactctaaggttatctggtccggtgctttcgtgcttttgttcgggggcgctgacgtttgagaatcaacctgggtcgaggttatccgtgataagcgggaagggaattgttcggtgatcggtgaaagcgagtcttcaactcttgttcgggctcggtgatacactactttgtcttgtggagttagcctcacaatcaaaagccgaaagtgttcattcaagttccgttgtaaatggtcccgtaggtggaggtcaaagggcggaggcgaagagcgattgatggattaaataaaaatggtcgataagactccccagccatgcatgataggtgacttatttatgcgtggccagcgcgacagtcgccaaccaaaccagagctattttgaatattcaagctactgtctcgaaccaatcggtactcggggatgaatttccatatgcttttgagcacagaatactcctttttatagcgtggtgatcacattgatttcatgggttgtctttcagatagggccacgcaatccacgtgactcagatgattgccagttggcatcgttcaaccagttcacggatctcttaggaggtttgctaggcattgtcatatacctgaacaccgaatttccaacatctgaagggaaatgtactatcagggagtacaaagggacttcttcacgagcctgttcagatatatgactcccctcactcttatcgcttccaccatgcattcccatgtttctgtctatatctttgtgtcatctaaggaatccaagttatatatagtgcttaagtacatgagattatgtttgaatactttataccgagaaggatagcatactcgaactcaacctcggactgtggttgggactgttttccaacaatatatatagtagtcaatcataagagatccattggccgcaatgtactcgtctcatcaggattacaagactatgaccacaaaatgattcttcggaaatccaacatggagaaatgctcatcaattgcaagcggtaatataaaatgatagatggtaaacatggtaatgaatgaggtatgtatgaagacaagataaaagaaagaatgaaagtgatatcacacaagaagatgcatctaaaggcgggaagaccagtaaattcccagccgccattttcaagcacgctaaaatccgtcaaaaaaaagtaactcccaagccacagcgcgcgtgcccgatccaagaatatcgagaagaaaggtgagaaacatgggagagagagagggagagagagagagagagagagagagagaaaagaattgtaacgtcatatcaagcctgtgacgcccttcgttggttgttttttattggtttttatttcatttttttaatatgccatcccgtagcccggggctgcaggacgacggccttcgagagagcttcgcgagtggcggctgtcggggcttgagctgcgcgcgtgcgccacgccgtagtcgttattgactaggcggtcgcgttcggtgttaccaggtgatccggcccgcttgggctcgtctctgtaggtctggtaggggccggtgaagttgaagttgctcatctcggcgtattgcttgcgctgtgggtgttccatgaggagcgagtcccgggcgtctaggggagtgaggtcgtcaatgtcgcggtttgctttttctataagaaagggacggttagtaaatggacatgatgggatgggacgtcgctttgacttaccagcttctcttctccgcttagcatgtgggttctcacggtagcagctgatgaaggcgttgactgcaatgaggatagcgaggacagcagtgagagtagactgtacgacaatgaggacaatgccggtgacggtctttgttgtttgagacatgccgagctcttcaacgaagaccagaacgcaagcaatggacagaacacggatgacctgaacggcgatgttgatgcccagtgatgccttggtggcatatgggcggctccacaccaagagtcccaacagaaggacttcgcaggcaagctggccggcgctttggaacagaccgtggccctcgccacctgcgatgatgcagcccttgaccaatgcgtacataatgacggggatgaagatccaccagaagtccttcttgtagttatcgtagaacagactgtattttttccaggtttctttatcttcgtacaggcgggaggtatctccctcggccttcttgtacttgcgagccatgtaaacaatgcgaatagcaaagaagagaagaagcgccgtgaatagagagagggttatagctgctagcagctttgctgcccacgagtcaccctttcgaagttggtagacacagtatagcacccagatactgtatagcacgaggatcatgttggtgattgtccgtgccatcatgccccaataatccttccggaagtcagacagcttgttagggaagtttccatacagcgcccacagttccaggatgaccttcattaaaagaataccgacgacaaccaccgcgataacgatggcgaagatcacgaggatagtcatgaaaacatcggcagaagggaccatcagttcttcagcgacttgcttcaggtcggtgattttgctggtagatgtactttcagtgcttgagctgttcgaaacactagcatcagtagaagtgtcaaccgagcgagcaaccatctcgccgaattggatggtgtactcccagctccgtttcgttgtgttggtggaggatgagctactttgcgtcgtggaggaattcaacaagaactcatagctttcatcggtcaagttaccacctgtggccgcccgaaattggtcgatggacttcatcagaccaggccaagggatcataccagtactccacatgaagttggaggagaagctgcgatagacggaggggtaggcgacactaagcatgccgttggtggccatggaatggaaccagcccattacatcgccaaatccagggctggaggacggtgatccaacagttcccgccgagccgatggcagagacaccgctcagtgccagagcgcctgccgcaatgcctgccgagacgtatttgaccgcagcgacgttggtggtgtggccgttagtcagttccgactgaatgcacgccaggttgctctggctttgcttggatttcaggacaagcttggcctgaccatccaagtcgggcatggtgaatgcgataccagggatttgactggcatatgcggacgggacgtccatggacccagtggccttgaaagaacccttggggacggggcagagttccgcgacatgaatgtcatcgccgcagggatcaaattctttactgtagagttggctgccataggcagtgacggtgatagtcgccgacacattctgttccatcgcgttggtaccagccaagtcgaagacaactactccagtagaacgagtgtaggtaacatccatcttttggacgttgattgccgaatcggtcatgcataggtcgaatccgtccgtagataggacgtcgcttgccagggcttgaggcaccatggccaggcctagcagagcccagatgaagttctgcatgttggccaagcacaattgatgtttgataggtgataccaatctaaatctaacggtttgagccaaggaggcgcgtagtcatcaaggatggaggggatcgactggcgcgatgatcggacgggttgtaaggatatgtggagcgactgtaggtaagtcacaggggggaaaattccaaaggaaaggcaggatcaacccgcgaaagaaatacaaagataataataataataaatgagtcgagagggtcgcaaggacgaggcggctgtgagacactggttttcgagcaaccaggagctgcaaacaagtgaacgagagacggtgaaggagggtggtaggggaagcgactggagattagtgaatggaattccccctctctcaatgcgatgatctgtgaaagaagaaaagagagggaagtctcgtagattacgactttgcgattagtctcaacttggcccctgaattttgagactgattggcctcccgtttcagtctagacctaacactcggcatattactattttccattcggcttggtatttatatcttaatgccattacccatgttattatcccgtctctattattcccaacgatcatcttaatcctgcacaaatctgatctggaaaggcgttgaagtacaccaacacagtggaagctcatatttaaagctttcgtccagaccgtccgacccaaggtttgccactcatgtaaccatggttccagcctaggaggtaacccgaaggagtggcgctaaagttctcccggtcgcccacacccatggaacgcattcctccacaccaatcgaggcacaacaacgccacaccagccacacgggatgccaagttgcccctagcgcgtgcgaattatgatgaattatgattcgaccattcaaattaacaatgttttattacggagtatggagtatgctggtgcaaggcggagatagcggtatgtacctgcagaaccgaaacataacgaccgagtatagactccgtatctatggtccgcttcttcaagaatcggacatccctattagtgcatcttgtgtatgagatgtgccccgcgaggggcaggtttgcagcctgatggaagaaagctgtagggcttaaaactggaccgccgatcgaagatccttgcacaatcccagtcctagacagtggacccttacagggttctggatggacacatacacactgttcttggagaaaatcttgccatactgcatgccaccaatcgagtccgagcactagaaatcctacacatctccgtatgaacgtataacatagaatttgagacttatgtgggttcaccctatggcccgatcatcaatgtgagacaaggctaagcgctggggttccactctcaatcacagagatctattcttgtcgcttttgacagcacagcgtatggcaccccaattattgcgactatcactacggagtacagcagcctcggacctccttccacggtatttattcgttgtccgtatataattccgtactccgtacccatcctgttgctagaaagcagtggagtaatccgtaaaagcttagcagatatttatatctaccccgtaaatgattcagtattatttcacggtttcagattgattgttaccagtaaacaaaccctgggatgatatgaaatggagcaactatgttgtacaaaataggggcctgatcccgtctccaagaagacccactacaacctaaagaatccattaatgaaagcaacataaagaacctcctactcgagagttaaataccaagtgcggagtagtaagtatagttagaaaaaacccgagataaatcatagacgcttctcttaatcccgtcggtaattcaatattgtaagaatacataaatgtagtctataagtccctatcctttacggcacggcataagactttatgattcaagcgtgcaagctcgagataatcattatgttcaagatagtacggatactacaatagatcttttttcaatgtcttgtttcctacataatgttatcgccgaaatagtacataatagttgcaaattgaaccacagactattcgtaatgttaagcataatttctactaggatatcccatgtatagcctgtgatttgtacaacgaaaacatgacttcttcaacgatggagatatactccgtaccttcctattagagccgagtatccggcagaaaatgtggtattcccaccgcctaccacattgtgaccgacaagcaaagacttccatttcaccgcccccctcatcacgtccttctctaggcacaagctcgctaccatggggcccgaggggctcgataagcccgagatcccagataaacctgagaaaagatctcgtcgacgtggggccgaactcgatccattccttcgcacccggctctgtgtgctcagaaccacagccaaatggacctacaaacagatccagaatgaatacccacacatcccactctcgaccatcaaatcgaccattctccgagagagcaatcgtgtcaataaccactcacaagcccgctctggccgaccgtcaaagctgaaggacgaagatcgagcccgaatccgcgaggcttttcatgcgaaccctcaaatcacatacgatgaactgcttgtggtagtggattataaagttggcaaggagtcgcttcgtcggtttctgaatgatgatgggctgaggaagacacagacccctgctcggtcttctttggctgggaaaggagctaccaaaaaagttgatggggctcaatcggttcagtcatatgacacaccttctgctgactgggctggtgatcttgcatctggtctagtacccagcgattcagatcctgcatctgctacagcgagtcaagtcgtcagcaattagacttgttgaaagagataccccgggattttcggcgttgcgcgttactttggaggttgtctgctcaattattcaaccagatttattctgcatgtcatgacaagcataagttatacatgataattatacaacatagagcattggaatgaaaccttcattgcaggattaatacacggcgaacaattggttccgatgaaacatccataatatagtgtgatcaattactgtatcatcaatcccataacctatagaaatgcttgattccggcatcctttgtctggccattgtttccgggcagcttgcttgtatcatgctaatggtctcagataaagtgtggaaattgcaggcaacatgctaacagaatagacccatttctaatcctagacggaaaatgggtaaatcatagccatttggggtaaatgctctacttagatggagttatttttgcagctcctgtggactcaataatgaaatatgacctgaataactagttattttacttcatgcagtcacgttgaaagatggaatttcataccccagtcacgtttggtacttcactatattcgctcttagatatgccaggcggagagaaagaaagcaggggctcactattccataaataggcatctaatagaactcacaggacaagtgatcaatatacatttggctttcatacagcatttggttttgagctttttcaatctagtcggtacattctcaaacactgtgtccatgtcttgtaggtttgattcccttgcggcatttcttgtttatagagcctacgttccaaaatatcctaaagtatacagccgttctataaacaaaggggaaatttgaactttggcggaagagtaggctgacctagaagatgtgatttagttaccaagctctgctgttaatgttagaagtaaaagattcaattactagactctggataattacattcgctcatatgtcacatgttggaatgcaacgcaaatatcaaccagatcaagtcgcgtcattgaaaataataataatagaaagagcccaggctgaacaaagcagcagggaaacacaaattgtccatatgagaatatcatcatgagaacaacaccggacgccggggtattttcctttttcccgaaaagcagccgcctatgcagaaacaaagaaaaatcgctaaataaatgacaaagataagctcatgtcatcgtcacatcttcggccggggtggcggcagtggaaggcacagcggatgcatcagtcatggcatcatctccatctgcatcatgcgcaggggagctctttttcgagtgtgactcaggggtaggagtggcagaatcgctgaacgcatcatcgtcagatccagggtcattttcatctacctcttcccacagacgaacagtcttgtctattccgcagctcacaaccatacgcttgcccttcagtgtacccgtgtgaacacaaagcacagagcccgagtgaccatcgaggcgctgcagaatttccttgctcacaatatcccagaagaggatagagccatcctcgctaccgctgacggcgaagcacaggggctggttgtagagcacgttttcagccccataagtaccgaagcatcccgacaagctgtatttgttgttgacatggccttggaaagtcttgaggacgcggctctggacataattccacatccgaatgcagccgtccagggtccaggccaagacatatttgccgttaggggagaacttgacgcatgtcgcaggcgggttgtcttccatgactagggtgcggagacactgaccgctgtgggtgtcccagatacgaataagtccatccagagcgcatgaggcgattaggcttccatcatgcacaacatcaataccggaaacagggtcagagtgggctggaagagagcgcatgacttgtgctcggcgaacgtcccacataaacacggcctcgtcataggaaccgctgacgaggatgttacccttcggtgcgaatgccatttgatagacgtagttttgatggccatcaaagaccttggtatgggctttgagctgtatcaaagtatcagtaaaaggccctaggacagaaaatgacaaatgagtttcttacagtgttcacgttccagaaacgaattgttttgtcatcggaaccagttgcgatccagacgccgtcaggggcccaggcaagggtggagataccagctagatgtccctcaaagacatgaatgagtctgccactcgcagtatcccagaccctaacagctgcatcggcacctattgtgcaaagtcagttatcaagttatgtagtagctagaccatggacataatatatacccgcactagcaatcatagagcaatcaggtgagaattgcacagccgaaactccacgtaggtgaccgcgcatcacaaacttctccttgtagttcagatgctcaggcttgggaggcaccggagcaacaggcgtcgcagaacgatcggaccagtcatcggcatcaccagcctgattctcgtctgaaccagccacatcatcttccgcgagatcatccgaaccgccctgtgaattgtcgtcacggatgggagaggggctccggtggtggttgcgcatgcgcgaggaacgccagtattcgtctgcgtccacagctaactcgtcagggctctcagactcgctgtagaggcggctagttttcttcgggcgctgtggggtgaacgccttttgcagggtccagctggctcgtcggcgttcagcttcgtcatgctccgagccggcggcgagttcatcggaggaggactcagcgggagattgggcgcgagggtctcggcgccgaggctgggggtttggatgatccattgtacaatagggatatgcaaaagcatctaaacaaacgatgcaaatgcgccgatatgggtttaaagatagcaaccccgaaaataaaatcaatcggacgcgtcgcgaaacatttatcaaggcggtgtatatttttgcgggcggtgagagtgaggcagcttttggtgactgcgtcatattaaaccacgtggacccgtggccgttcacatggattaacacttgtttagcactttattgaccacttcctggtcgactaatacgcctaaatatagctttcaaagctcattctggtcaatatctggcccaatggcctactctattccctccaaagctccaaccgacattcgtgtcctcacattcaactgctggggtctcaaatacatcgccaagtaccgccatgaacgcatgtcggagattgggcggcaattggcaatagccagcccgccgcccgagatagttggactgcaagaatgttggacccagaaggattatgaaagcattcgcgatcagactcgacacatcctaccgtatgggaagttctattacgggggcatatttggtgcgggattggcgattctatcaaaatggccaatcgaggaaagcagcatgttcggctacccgttgaatggccgaccaacggcattcttccgaggagattggttcgtggggaaaggagtcgccagcgcacgcgttcggttcggtcccggtactgctgacgtcgccgaggtgttctgcactcatctgcacgcgccgtatgagcgcgaaccaaacgactcctatctctgccaccggactgcgcaggcatgggagatctctaagctaatgcgtggcgctgcggaacgcggtcaccttgtcatcggcctgggtgacttcaacatggtgccttcctctttcgcgcaccgccttatcaccacgcagagccctgtccgcgacgcctggcgtgagctgcacccggactcatccctcgcggcagcaattgatcctgccgaacaagcacggaatcggcctattcccactgccgagttcaatcttaccgagaatggagctacatgtgacggggccttcaatacttggcgttggactgaggccatgcgcaagcgcctagtcaagggtgaggatattgagattgacaatgagaccccagacccgcgcgccaaacgtctggattatatcttcatcggcgacggtggctacccgcctgcattcccgccatctagctggtcagtccagtcagttcagatctccatgacacagcgccatcccactctcctctgctcgctgagtgaccacttcgccgttgaggctgtcatcacccgttcttctgtacggacataccctccttcccactcttcagactctgccccaagctctcccacttctccttccctgcatgaaacaacttcaaagcccgtctcccccaacgccgccctttctccagacacatatgaccacatcattgacatgacccacacatacgtggcccgtgaacgctctcagcgccgttggcgtctggcgcatttcttggtatctattgtgatttccattggttgcatggtcggcgtgtggtggattggcaaccgcacgtacatcggattcatcctcatcctagtcagcacgctcaacttcgccgctggggttttggatggtttgattggtgggctgtttatgtcgggtgaattacgggccttgaaagagtttgagtgggaggtaagaaatgctagaaacctggtcgttgccgccgagaatagggtaggtgctacttctgaagaaagggacggagatcagaaggattaaaaattttcaccgcaagctggtttgtggaaaggggaattatacgtggaaggtgtggcttgattgcgcggcttaactgtctgtttatatttacttaagtgtagtatagtatatgcccagctagtcttatcctcgactggcaaaactaattcataattcccaagatcaacttcaagatagactacttgtctacagattaagcataagagaattcggcatgaaatgagcgtgtgcatttgttaaaaattcgtcatcatcaaagcgaccgagtccaccagcatcaagcaaggagcaagcagaaacgacaaagagagccagcacgagagagtgcgaatttactcagcacactcgcgcttgcgggtgtcaaagacacgcagagtctcctcagcagccttaacaccactcataaccatagcgccgaaagtagggcccatacggttgaagccgtcgatctccgacagctccataccaccaatgataaggcccttagcgacctcacgggtgttcttaacaatagcgtcctcggccgcattcatgtcaaggccacgcatgccgccgagcttctcaatagcgttcatggagacaagacgcttagcgcagaaagcgccgaatgggccgtcgtggccagtggtgctgacgataaccggggcattgatggtgttggggtccatgcaggagtggtcgtcgtggtggagggtgacgagagtccagttgacgacgacaccggcgaggcggatgtcgttgccgtcgggacgggggatcaggtcctcaacgcaggtcgcgttgaagagcttgacgttcgggaaggcgaggacctttgacaggagcgtcgacgtgaacagcgaggcgtgcttgacgacgacgaagttcgggttcgagggctcttcctcgaagggcacgccgagctcggtcaggaaggcatctgcggggcgacggaggatcatggcgctgaatagctgaccacctagccaggcaccgccacctatatgatatgtgtgttagtggtgctgtggtaggtctacgagagagggacgggtgatcaggtcctcaacgcaggtcgcgttgaagagcttgacgttcgggaaggcgaggacctttgacaggagcgtcgacgtgaacagcgaggcgtgcttgacgacgacgaagttcgggttcgagggctcttcctcgaagggcacgccgagctcggtcaggaaggcatctgcggggcgacggaggatcatggcgctgaatagctgaccacctagccaggcaccgccacctatatgatatgtgtgttagtggtgctgtggtaggtctacgagagagtctgctcgtgtggagccgagactaaccgggcgaaacagaggcctcaatgatggcgatcttcaggtctggacgggccttggcgagtacataggcagtactcagaccacaggaaccagcgccgacgatgacaacatcgctctcggcgtagttgtccagatcctggaagtagcgtcgggtcatggcgcgagagacttggctctcgcggataggggcgaacttgaactcatcccatttgttgccgaactgctcaaggaggtttgactggccatggccggtcagtgtcaccgattcggggacgatgaccttgcccttgatgccggtaggggcaacagtagcaggctcaaacatggcagcgggaggagacataatggttcagagatcaagtcggggatttgactttggaccttggttagtttgactactctatattgggggaggggagggggggggagggcatgatcctttcgctggtattatccagatcaagttaaaggccgtataatctcagaacgaacccacgccgacggtgaacctgatgtctaataagagacatcggattcaccaccgacgcaagaacggacaccggctcatacccagaggttacctgagataccttgatccctgagggataatgtgcccagccaaagaaaatccatggctcccgaaggaagggcagtatgtacttgttcgtttgggatctaaacaagagtcagccttgagggtatgcaagcatgacatggcagtagatagttactgttggaatataaattcgtcacttgattgatgaagagaagaagaagaagggaaaaaaaaaacaactgcgggcaggtcaaccttatatgccaccttggaagagtcataccccaccatccccatcgccatcccacctatcgagatgtcatattgctccgactccctccggttgtccgacgagcttcccggtgagctacgttgcacgaataagatgctctcgagtgacgtttctagcttttctagctcttggctacgaatggccggagcgttctgtcccggacttccttgttttgctccacgagagtaccggtacaacataggtttcctgtgagtacatatggtatgtagaactgcacggtagattcttgaaatagaatgtgggaatataatacgttaatcaacaactcttacactgtaagattgtagctgtcaagcttgtatggagggcgtaggacatcgatgtacgttttactgacggtgactacaatcggaccaaccttgaaaagcaccaaggtcgcagaatagatcaattattatcggaatgaatctacacgaacttgcttggtataaatatgcgaattcaataggaatatatttcattttttcttcgaagaccctatgtgggttttctgacatcataagtcatcacagcgtttagctgggtcatatatatgtgtctatacttaccggatttatttgagctgccgccgcttttatgtagccaaacttcgactacagctggattgatggcggggctacgcgtatttggtacctggtatgggttgctagtgagtctcttgggttgagtatgatgtctttattactccaaaccttatccatataatttcggacaccggaatgtctgcaccttctatcctcgtgaattccccttcggaaaaccctacgttggccttaaaaatgtctgatgactcggactccccagaagtcgagcactcagacgtcgagtgcttcgaggcgctgcccgacgacacagtcgaagccaccgggtcgacggagagtgccatccggaagattattagagaaaaccaagaaacaaccgacgtggtgaaatatatatgtttcacaaacgtcctaccaactattgcggacaatttttctttgcgcagtactcggcagatgtttaatcgccgcactcgatatatgatcatcaagctctttattggggcccatgaaacagcttcatgcggcctgggtggtgcagtgcaatatgagatatacaatatggggctgggcaagtcgattcgcccgttagggtccaaaaccatccaaggtatgttttgcagaaaggaggccgaccgttatggtcgaagtgggagtatcggagtcatatcgaaagctgcgagcagatgcagaatggtggctcataaactcgaggggcgatgtgaagcttgtaattatcgtgtccattagtcgaaagacccccaacatcaagtttgaggctgttactttggacccgactgtcaactccttgcgactgcagtggcccaagatacggcggaccattacggcatcccgcgacgcaaacaaaccctactcacagattaccatcaggccagcagtacctttgatcatcgggtttgaagaattgctttgtcgtcaaccagtcccgcctgaacacgacattgaactatcacctgatcggttgggagggatctcaacacacgtgtggggggagcaaggattctagcttattattacctctatacctctgttagttctcgtagctagcgtcttcaatgacacaatctttgctacaataatcgtggagtgattgtcaaagcgctgtgtagattcttgaagacaggggacgcgacagagaaagatggctgtagaaagaagaagaatgaaggtcatgaaggtttatttagtacatgttatatatttgccatactatttgtttgccatactgtatctcttgtactttatcagtttctcaagcagtttctcaagcagcttctcaagtggttgcttaagcggttgcttaagtagttgataaagtaattgacgataaagtagttaattaagcagttaataatgatatgacaaaagggacttaattttattagtggtttacatacaaattgtaggtacctactgccatactactacatatggcaggaaatatgcctaattgtgcacgcggtactgaaattacaggcagggggggaataacccagtcagaggggcgctttgcgtagcattaaaagttggaatcagtcgcttcgctctgcaacgactatctggaggtcttaggccgtcgagatcactagtatgttgagccgagctctggtttaatcgatgagccgacctgtactctggaaatcagagtgctagatgatgatcaggtgatgcagaatactcagggacgtgctccgttttacccagtgatcaaaaagcggcaagaggtgagcactaaaatggaaagggaaaggtttcgagtgccaggcattatccggtacatatgcaagatgcaagagaatacatgttatccgtaagagaatgcaaaatcacagcacaaaacggtaattggcaccgtaattgtcctccgctaccgggccatccgcaggttttgttgggtcttcttcaatttgaggcccatacttcttgtcaaggcgccggttctcccataccagaagcacacgcagagacaaagcaaggagtgaagtgaagaacatgaaaccagcacagatccccataccctttacatacctcggggcttgtgcatctgggaagatgttggtgcccaggaaaggcccacactggccgatcacgttcaacaggataatacttccaccacggcgagtatcggagccctgattgtctgcacaacgtaacacgtccagtcagtaaaaaagctttgcacagaaaactctaaggatcagaaaagggaatgactcactcagaacccacggcagaatattggcgatcgaggggaagactccacaggccgccaagaacacaccgaagtatcgaacacccactgaggtgcaggtagcgcacaggatataccccacgccaccaaccactgataaagctgcgatcgtcaatccacgctgctgaatgcgatccgccacccaagtggtcgcgatcgtcgccaggaatgaggcaaagaatggaggtgcagtgaggccctgggcgttgatggccgtgaagcccatctccttgagaatggtgggtaggaacacggggagagaagagaaactgacgttacagctgaagtacatcaactaggtacacgtttaatatcagcaagttgtgcgcacaatatacacaatgagtacttactgctgtaagccacgctttgacgtcgagaagcgtcatggctaattccttccattggatcttgactgcacggtccggctcaccagattgttgcattgcccgggcacgcgcaacctccttctcttccttattcaggaacttggcgtcctgcgggctatctggcacgtagaaccaagccagcagggcagctgcgcagaccggaacaccctcaaccaggaacagcaatcgccaattcgccaacgcggaatgtcccgaagtaataccatatgccaaggcaccggcgaatgtatttgccagtggtgcggcagacagaaacataccgcatcggagacccagctcgtggcggcggtagaagaatgatagcagatagggcacaccgggaccgaagccagcctcgaagacgcccattaggaaccggagtgccatcatgcctttccaattactgaccgctgcttggcatgttgccatcaaaccccttttccgttgtccgtcagtccatgttcctatacattcgcaaccccggttgaatgacagcattgcacgtgggtttcataccaggagaacaacacaaaggcagcccactggtgcggcttgacaatcttccacatcattgcttggaattcaaacactgtatatgagatatagaagattgtcaagagccaggcgtagctttttccatcgaggtcgaggtcctctttcatgccggcgattttggcattgctatggtttccatcgtcagcggtcgtgctattttgcatgcaggtccaaggatgatatcgcgaacgaacccgatgttgcttcggtcgaggaaagcgaggagatctggataccacagaaacgggttagagtacaaattcgtttaatgtctggagtttgcagcatacagaaaaatcccaataacgtcacaacatgccagtccaatttccttaccactctccgctctaactcagggtcaatagccggcaagagtgtagtgggtttctcctggtgagtgggcacggcagatttctcaatatcttcatccggggcagtttggattacattctccaactgctcctgcctttccaagaagcccatggtgaattggagacgtcccaacagacaacgggatattaacaaggtgaaaaaggaagagaaaagagaaaaaggtcggacacttttccggagttggggttcggagtcatacttattcgcacggtgagagggaaaaaagcctggatccgcagaggcatactggcgtactacataatacagcgactaatggccagcttctagactggtgattggtgggaactgcagaaacaatttatgcatctattggtcatttggacaggcgaatgagatttcgaggtggagaattggaaactggagaaaatgcggaggaattggcaaagcttaggagagccgctttggtctgataggccgaggtcggggagcagtcggtgtactccgacagtctatatgttgtgctagttatctctttcaagatgaaagtaccttgatattgactgaggttatctatgtggctatttaatagaacagaattctcatgctgtaggtagaaaaaaatgctagtttgtccaagtgtgcggagtatagatctacaccatacttgccaacatcccttgaaatctcttatataaccatttattcatcatgtttgtctatttataaactacatgaataatgaatagtgagtctttcaaattggaaaaacgtaactagttaactataaaaactgatgcctgtaaatccaggtgttctgcatatcaggtcagtaccggggaccgtatcaaaaatctcccgcgtactgtcgcgttcatgaaacaactccatccttcattgctcttgccttatctaccttcatcgcattacaattccgcacttgattcaaatctaatttacacgtgtcttcccaaagcggattgcaaattggcaatcaagcgcgcaatatggatgacccggccacacgcatcccggggcagctggtaagaccccaacagctcccgtgtcaattgccctatgctctgtaacccccccactaacattgtcgcaattatgatagctcccccacatgcacctggtttcgcgcaaccgataccctagcatgcacatgatgccatccgagaccgccgtcgagtatttgacgagtgcaccccggatctgccaatcccagccaatgcattggacattcctcgatggtcccccggatgggactgttatgcttacatggcagccacaaaaccatctaggcaataattttgctagtgatggctatgtctgggccgaccaggaacaggcctttacctttgaatctcgcggctatgtatgcgaggcttcccctgctccatgtggattccattctaatgcttaaggacacagaccgtcgagatgtaccttcaccgaagtggtttccaccctcccaatgagcccgtggcaacacattgccgcaagcgctaccgtatcacctcgtccaaagtaccaaacgctccccagcccgacccatccctgtggattgtgcactacacccgtgcggcgcctcaggaccatgcccccgcaaatcgcattcaagttacaccccaggtccagggcatgatgggccagcgccgtttcctccagagccaaggacaattggcccgcaaggactttttgcttcatgatcgcaacagttggccggttatcaacttcccgcagatggctccccagaactttgggcaacccggtgcttacccagccgctgtgcctcgtggacctggtttctatgccccccagggtcatccaggtgcagttccgccgaatgtgcccgtagccaaaggaccgcgcgggcaccgtgcgccgtcggctgccctcgcttctacaacagccgattttgctgttgaagatgaggacgtctccagtggtgacgctatggatcttttgacgccccgcgatgtcagcaagatgcgataccagcagcatcacgagtggatggaggaaatcttcgcgtcaccatacagtatctcacaaatcacaccggtttctttgggtctaggccgaaagggagagctcgagtctctgactgcgggcttcttcgatgctccggtcggaacctctggcggagacggccaggaggcgggcgacgccccgcaggctaacaagatggagccggctaaggcagaggagttcgccgagcgggtttctaaaaaggtagcgaacatgaccgccaagatcgaaaacttgaagaaacagcatgctcgccggatgcaacgtttcaaccgaacctcattgctcaaggatgccgagttgcgcctccgagagtctgctgctgacccaactgaaacgggcccagagatttggagactggagggccgagtggtcattccaacagaggacgaaacccctcaattggattacattgaagataaagccaagtacagggttgatgaggtaatccgggaagttgagacttcctggaataagcaaatcgtcgcggagcccaaggtatcctgtgtcgagaagggtggtttattggagaagattgaacccgaacacaaagacgagcctgactcatttacaaatgatatggtcatggacgatgattcttcccacctactcaaccaatttggcagcccgggcgttggtgtaggcgcagtctcaggcgtttctgtcaatggacaaccaatccacggcgctgatatgtccggtgatgttgacatggatttgggcgaccagctccacgctggtactaatggccaggctaacgactgggtaatggtgagcaatgacagcaaagaccatggcccagtcggtggagacttcgactttaccaacatcgacagtgccggagatgcgttggcagcttacagcgagcagaacgatgggcttgacttgccagacctggagaattcggcgttcggcgacgcgttccatgcatctgacaatgaacattcgcacaaccccgatgcggacgacatttcctagtctgctccgaaatttttcatatgaaagtgtgtttctttaacgaataattctgcggatcagtcattctagtctgtttcaggtgttgcggcttgctgttcgggagtctggatttatgcaggatgctttagctggttgtgtaccataggattggccgagggaattctctgcttcctctggcttctttttttttgttgcctcgaattgagaggatagagagtgggatctcctatgaatttaatccctatttttcatctatcttccaatgtaggtttcatcgaatgagatatttcccaactaggaaggtaacagttgtccacgggtgtccacgaatattcagaatctggaactaagggacgcctaccttctctatgattatatacttatgtacctatgaagtgcatgaaaccttggatatagtatcataattagctaatagtctaggactggtacagctagctgctagtgtgtactctgatatcgggaagccgagagtggaaaatggccctgaacctttcacgagacaggcttcaaaattgaaagaccatcaccactcacgcataatacaacgtcaaccttgaaatatccgcaatcggaaaggtgatggcatgtatgaactgctccatcgacttccgcccttgcccgttcatgacgtcagtcaccgggactgcacttcctctgagaaagaaaagagaagccttggaagcgaatagggttcgtcaccatcgtcatctataggaaggtgctaccgacttaacattaacctctcccatgttcagttttctcggtttctcatcttaacatatctccccccataaccctaacttgtattgattgactatatctacatacaagaaacaagatgtatgtattctacattctcaatcctcactgtgactaaaaggaagcctaggaaccgcaacctttcattccgatcacgcagggagccccctcgacagcggttcggaatttccaccttccgtggaatgcaagcgccggaattgagccgcaagatgaccaagctgatcaagagcgagaacactgccattggtgcccacgaatctgccggccgcgagcgcacctcgattgccgcccagctctctgaatggggagaggcgactgaagacgacaatgtctccgacatatccgacaagctcggcgtcatgctcgctgagatcggcgagcaggaagacagctttgcgcagaatctcgaggactaccgtagtatcctgaagcagattcgcaacatggaggcctcggtgcagccatcgcgcgagcagcgccagaaggtcactgacgagattgccaagcttaagtacaaggatccttcgagcccgcgtctggtcacgttggagcatgagcttgtccgggctgaggctcagaacttggttgctgaggcgcagctgtctaacatcgtatgttttgattctgacttcgttctgttcttgtggtgaagatagttttgaacttgctaacattcatctcctgcagactcgccaaaagctgaaggaggcttatgatatccatctgacggctgtgattgagcgcgccgagaagcagactattctagctcgccatgctcgtcgtctgctgaactacattgatgacactccggttgttcccggcgatgcccgccaggcgtatgaccacgagcctttggcacgccagatcctcgaggatgccgagaatgatctccgtggatgggaatccagcgttgagcctctcatcaccgtcacgggccgggaaactccggttcatgccaacggaaatgatgccaacggtaccagtgtcaatgaacgcgatgatgtgtcggatggccagtcggatgttctcgatcatgtctctgtggctgagggtttcaccgagccagtgggaagcggtgcgctgcccgcgaggatggtggtgattgagccttcgcctgcgtgatcgtttcaattcttctcagagattcagtggtctcctttttagttcaatgcggacatacttcagctgttatgtgtaaattcggttcttcgcctcagattgggcaccaagacttgctggtgtttttgggaaaggcgttggctggcactgcacatgggggtctatactcaggaaatatgcaaattgtgtattgtaaagtttaattctctaattctctaattcattacttcgtttgttttgttctttattctctttctcccaatatctttcaaagatgatatgaaatgaacatggcgatttgtagtagagcatgcacgtgaccacaggcgccagagtgacgcggaaaccccgagctccagcggagcttcaaccatcaccgactatctcaccagaatccctttcacgtccttctagcatctttttttctaattttctccttatttcctcttccttcagaacacaatggataagcttgttgcccaatactcgcgccctccccatcagaatgagttgtactcagagcaagagcagcaggacctcactgcgagcgtccctccactctcgctgaagttcagcctccctcctgtcgacaacgtgagttcctgatgaatactatgggagattctcttgcgactggatgatggcggtttggtcggggatgtacatctatcctgacgtcaacctaagctgcgccgtcatcacagctatgtctaagagaatcgctagccagaaactatacatgattgaaaaaagcgaaataatggactgacgttcatttcttatatctagcactctgctttcctgcgtgcgatgaccgatgaccactccaatcccagctgtcctatcaagctcgcccacggcacaacaaccttggccttccggttccagggcggtatcgtacgttttcctatatttcggttacaccatgggtttcttaattttggagcattttgctgattgaaatattgggttagatcgtctgtaccgattcacgagcgacagccggcaactggattgccagtcagacagtcaaaaaggtcattcctgtatcgcggttgagtcggggtgaggacaagaagacgaacgagccgacgccaggtcttctgggaacgatggccggtggtgcagccgtaagttggccgcaagctaatgggtgatggcgtgatggatgttggttgctgatggttgtcgcaaattgctaggattgccaatattggttgcgttatttgagtcagcagtgcactctgcatggtaagtcagctcgattcttgatattttcaggcatggaaggacatggctgatgaatttctatctagaaatccgacacaagcgccgtatcactgttgcggccgcatccaagatccttgccaacctcacttacgcctacaagggatacggacttagcatgggaactatgttagcaggagtatgtcctatacaccattcatagccatgagattcggaactgacaatgatctctagatgacaccccaagaagggcccgccctttactacatcgactctgacggcacccgcctcgccggtaaccttttctgtgttggatctggtcagactttcgcttatggtgtgctggacgccgagtacaagtacgagctgactgtggaggacgcattgaacctcggccgccgggccattctggctgccatgcaccgtgatgcctactccggtggtttcattaacctgtaccacgtcaaggaagagggatgggtgcaccatggattcgacgacatgaaccctatcttctgggagacaaagctccagaagggcgagttctccaacgtgacatctacgttgtaaatgggtctagaggaatgaatgtttctgtttaatattgatatcgatatgccattgaattatgcttaggtttcaaccaacttgtgtgctaggttcaatcagatggaaggcaatagctccatctccctatagtagtcacctgtctttacaaggttctcctggcctgcttcacagaatatcggttcccaactaaacagctagttgcatagccacctcaatatgtggaaacctccctctaatcaatctaaacttatccaacagaatatccttcggcataacctgcaaattatgaaaagaaagcacaaccccctgcataaaaacaatatcatcaatgcgactcgtcgtctcctcttcagtcgcctgcggcacatgaatcaccacatccgcaatagtattaacaatctccaacaacttgctaatcatcgacgagccatgcacccgaatcgtattctgcgagatcttcgtcaaaaactgcctgagctgactcgacaacctcaacggcatctccagctctaacgacggacacgacgcatgcgaactaagcaaacaattcgacatggccaactgccacaacagcgtccgcatccactgccgcgtaaccaccaaatccgcctgctgcagctccgacagcgccgaaacctccacctcccacaccgcatcatccaactcgcggtgtttccgctccacccacgacgcagtgacctgcgtgcggtccccaatccacagactcataaacgacgcatccagcatgcagaacgtcttgatcacctgcgtccagccgagctggatatccgcgcccacgaacgcgtcttcttccgggtactgggtgtgcgggggcagtgtcaccggggagaaattcacgatggataggaatcgctcgtggatgaagcattgccagtacagtcgttggcggcgggctcgctcagccgtgctgaggctggcattgacggttttgtcgctgatgcggagcatctggatcatgctgattgcttcgcgtaggtggaagaagcctagatcgtagtggcctaggctcatggcgcacatctggatgaagatgcatgtggtggcgcgtaggattgacggccggaagcctattactagtggttcttgggtttccacggactggcgcattaggtctgttatttgtgttgaggttggttgggggctggatttggtggtgcattgaaaggaccgcgtgacatccagggttactgcggtgaaggcgtagatgaaggctgcgtgctctctttccgtgtccatttttgtgattgatgtgcgcacttctgtctcggtgattattgggctgaatgggtatacataggacatgtatgctgggagtaggctttcgaagtatgagcttggtagttggattgaggctgtaggtgctggtggagagagatgtggtgtcaaagtggtgggtttggtgttggtgtttttatatttcgagatgacagctcctcgacgtagtgaatgttttcttgatcgcaataaacggttttctgtgtaggtgcactggagatccaggtgctcgcactgctggcatctttgctggccattacaacgaactttgcggcgattacacgggtcacatgcttttggcactcgtggctgagaagttggactagccatttttttctttggctctcaagagcaagtgtcggaggtagatgtctagtcggaacatgtacttcttctccccgcgttcgatgttggtggcttggcacttaagactctttcagcgtagcgtcacggggttattctccgcatatatgtaccggataattccaatgagtatctatttgtgagtacatctgcgcttcatcgatatcgcaaagcaagctaccgaccatttaacctcacgggtcaccctcccacatgctgtgtatatatgtatagcaggggaaaaggaaaataccaaaaaaacaaaaacatacaacagtgaggattcgctggtggtcacccacccaactactaacacaccggcgtgtggcttgagtacggctgagcggacgggaagccctgttttccacaccctatggtcgtatgtaccagtttacgtatcagaaaggattaaccaactataggatagttagtttataatcaactagaagaggtgggtgcacaatcgacagggtgagaatcgagctccatagaatcccatgtttgagaagttgtaacaagaatgtacccctttggtcggtagctatgacaagtatgtcctttaagcctagcgaggccatatacctcgttcgacatttagtataccatccttctgcctcaataactacttgcacacgtcacggcatataaccagtaaagtactcaagacgattcttcctttttgacagctggtataatagtaggagggggccacttaagagcacccactgtacatacgtcgatggagactcagaaatttcacgtgactctcagtctgtattcaactgccaatagcacagtttgaaaacgataccacgatgtcgtccaaaagtaccgtgcgactgatgtcgccaacgtcgagtacgctgcgacggacctttaccttggcgtcatcaattatttctactattctgcggctatgccaatatacatacaactcgattgatagatcgaaagatccacctcaggggatctgcaccatctgcgacaccccagagtgaaagctccaccgttgtgaattgtctccattcgaccacgtggtctgcatgaaataccaatatcccacactgaagaacacgtatgactcggggttgtgccgaatggcatccgccctggtcatcccatatatactggttggcaaaatttcgatttcatcgtacttatccttgtaggcttcagttatgatttcgtcggggttctcaagcagtagttgctgacggacccaaaggtcttgatgcgagaaagcattagctagcgagccatatagcatcaaggtgattcaatcccgtgaaggttgcacttacacgtaacgtcaggggtgggatcattgcccagaaccaggtgaaacaattcatggtagagcgttgcgctgcgcggaaggacgtccgtcagtttcctccctcccctctgcccgacaagaggactcttggacccaagcttcacgctatatcccggctcgctaaaggacccttgacacaaggtgatcgtgggcggcgtggtcatatgctgcgtggtgcccatgttggcaccgcgcgccacggtgcagaaggtttgcccatcatagtcatcgtctacgaggtactggcccaggtcggcggaccagtaagggattcgctcgttcttgatccaaatcatctggtcctcgtcatagtcccagaaaaggtgcctgtactgatcgcagttttcgatcgcgaggagatgctgttgcccattgtcgtccattgtccagatgtcgttgccttctatgtcccgggcaatgtctgtccgtgcacgcttcttgagccagttgtcgttgcagtacaagcgtggtgtgttatcaagtgtcgttcccgagaggaagttggacactttctgtagagaacctggaagcagaccctgttagccatagccatcctcaaccggagatttggtggagtcttgtacctttgataagcgcaagcgctgtcgcatcattctctccaacaccaaagtacgcccggaggtatcgcttggcgacatcgtgctgggcagcagaggaatcctgcgcatgcgtgatggcctgcaatccggcggtagctaggtctttgctttcttgcaaatactgcgcgagcaatgtcgatctttcgctacagccacctgcttcatcgttatcgagattgactttgaacaatgagccgattgtctggcccgcagcaagggacgccgcggaaagcagcccgcacacgacaattggcttgagctgcatcttggatttggtcttcctatctccggaaaatgcaacagcagcgaggaagaagattttgacctgaccaagtgatctttctgttctggttgcccctgaaagccggcggaagcatccatatccactagtcgccgaggcgagactgcgcgagattagtagtaaattgcatacaacatactagtctaccacatgcagtggtatctgcaagctaatagggccccacaaatggggtctatgtccacaacatcagagctgcctcggcaacgaaccagggtcactatccctatctatatgatccatatctaccggaccatttgccatctcctatggagtgataattggtactcctcaaacgccgcttctctctgccactaggaccagaatgccttccatgcaccccctttccctcctcaccgccatcttggcctcggcgctggccgagtcctcttcgtcctcctgctgggacaccatgcacaactcgaccctcgcggtcttcagcagcgcccctatcgccttcagtctcgaccgtgctaccgcgttgcagtgccaagcgtggtgcgggcaagtctccaactgccaggcatgggtgtttgtcgaccaattgctgcaatgcgacctccaccgcgcggccccggtgaacgttcttcccgagaccaacggattcgtcttcggtggctgtgacccttccggcgcggtcctggatttgccaagactaatatacgccgagactatggtcgagggcgcagcctcgactcccactacccaggctagtgcgatttcactcgccagcagctcgagtggtgctaccccggagaagactcacggggtgcccgagtcggtatgtctctgttagcttcccagctgtgacccaacggttgactgactcctgtttttttttctcgattctagattcatccgaaggtgaggcgccatggccactcgcgccattcgcgaaatcactggcactaagccaggcggacgacagcccagaggctcaggggcgtgattggagatacggataccgtgtggggcccatgtcatgcgggacgtacggaaagtgtggtttgcatggagaagtatgttaagcgaggtggtatttgggggctagtttttgttccagtaaaacccttggcaactttagcgtatcagttgaatatccgtaccgaggtactctccattgaagacccacactgcttgagaaaccgtagatatgggctcgaacaatcgcctgtcattcttggaaatcggggatagataacccccaatgccggcgaacggtgattcagggacacatgggtggatactgaggggcaccggcgtcggccggatgaacagggtctttccagataggtatcaactccggagactagccctagtacatactccacaccggtatctataccatcagtagcgtcgtcgatggtcaaattgctgttccacggacgtaatcgtcccggattcaggggggattcaatatagcgggctcattcgaaacctggataccggcagaaagatccagatcaggccccagaatgggctgccatatatacaagaagagaagctcgccaaattttgacttcttccccctgttctcattcttgtttagcgccctccgccatggtctccttgctggcttgggccacggtgctgctgctcgcctgccgagtgcagctgcaagtacaggcagcggccgtcttcgcgcactttatggttggcactccgccgtattctctgtcgtctgttctcgctgaccgtgcaggtcacaaacacggccaactatacttctaatgactgggagaacgatattcttctggcgcaggatgcgcacatcgacgcattcgccctcaacatggcgtatgccgactcgaccaacacgggtgccctcgctgccgcgttttcggctgccgatagtctcggcttcaagctctttttctcctttgactacgcaggtaacggcgactggcctaaagccgacgtgatcaccctcattcagcagtacagtgctcactcgtcctactacttctataagggacaggcctttgtctcgacgttcgaaggccctggacgcgccgacgactggcccgagatcaaggcggtcaccggctgcttcttcatccccagttggtcctcgctcggagccaagcctgccgtggcgacgggggtcgtggatggtctgttcagctgggcgggctggccctggggcccccaggacgcggacacctacgtggacgcctcgtatctccagtatctggagtcgctgccgtacatgatgccggtctcgccgtggttcttcaccaaccttcccgggtacaaaaaaaactggatgtggcgcggggaccacctgtggcatgatcgatggcagcaggtcctatacattcaaccggagtttgtcgagatcatctcgtggaacgactacggtgagtcgcactacatcggcccgctgtacgaccaggccatggaagcgtttgaggtcggcgaggcccccttcaactacgcgacagaaatgccccacgacggctggcgggcaacgatccccttctgggccgatatgtataaggatggaacggccgaggtgactgaggagacgattatcgcctggtatcggcttacccccggcgcggcctgtgacagcggcggcacaagcggcaatacggcctcccagctgcaggttgagttccccccggcggagatagcccaggaccgtatcttcttctccgcagtgttgggctcgttctcgggcgccgtagtgtcgattggagactggacccagacggttgggtggttcgatgtgccggatgatgatgtcggggtatactacggcgatgtagccattggcgcccatcggggtccggtgactgtgtctttgatgcgtgataatgtgattattgcgacgattgagggcaaggccatctcgtcgacctgtgaacatggagttcagaattggaatgcctgggttggaagtacgtctaccggggagaccgtgtcggcacgaccgacccgtcttctgtcagagcaggtctgcatgaacggtaccggcgcgaataattttgccggactgtgtgggtttgcctgccgatacggatactgtcctctgggcgcctgtacctgcacgcgaatgggcatcgggtacgagccgcccaactccacgggtgtcctcggatacccgattgtgggcgaaggcgcgagttacagcggactgtgctcgtttgactgcaacctgggcttctgccccgagagtgcctgcggcactgtggaggtcccgctcagcacgccgacagtctcgccgttcctgccccccgcctgtgtgtccggttcgggtgagggcaacctagctgggctgtgcgactttggctgtgcccatggcttctgccccatgaacgcgtgcacctgcacggggcagggggcgctaaatgtcatggatccgacaagcgagaccgttgggaccgccgcaccgggagtagacgctaccgtctacggtcctctgtgcgagtacacttgtcaacgcggatactgtcccgaaggcgcctgtatcgtcgccgaggactcggactcgggctcggggtccggggatggaccaggcgatggcgaggtctacattgccccgtcgatctggaatatgccctcgccggtcgtgcaatgtgagcctccgtgctcgctgatcatgcctccgctgcagctggccagcccttctgtaatatccatccctccctgggagagccccgtcgagcagagttacttgacgaccagaacgactacctatgacgacggagtcgtcgaaacatacaatggctatgcggttgccaccaccaccattaccatatcctttcccccttgtacgtgttgagccctcctccccaatccaccctcactgacagtccatcatcagcggtcgtcaccgagatccccgtatggggagtgaccatcaatgccagccaggctcagccaaccgagttggaaatgacgaggagcatcaccctgccctatatggtatggtcgcttcccccgttcgatgaagaccccaacgcgacaagcatgacggggacggtccttccgcccccatatccatggtcccaggccagcaaggactccgagctcaataccgcgaccaccacctggtcgtccggcagtgcgactcccacggcagataggggtaacccggacgtcggcgtctcgtgtaagccattctgccacctgtgtctcttgtgccgcccagactggagcgggggcggcggcgggggctccgacgatggcagcaacagcaacagcaacagcaacagcaacgaggacgagtgcagcacgcgagaggcggagatttgctctaccgtgtgtgtggccgggtccgggtgcgagttcgactgctccacgaccaccggctgttccgtcacggcctcggccaccagcaccgtgggcacgcccgcgcccgccgtggccatcacgctggagcaatggcctgaagccaccgaggagcccgatgcagaggtgaccagcatcgctcggtcgctcgactcccggctctccgccctgtatggagacctcaccgtcctaacgggatacgaggatggagccgccacggccacggccaccagcaccagtcgcgcgaccacgacgaccagcgcccccccggacctcccaacctcactttccgacctccagttcgtgatcttcctgcgcaaacccgccgactccctggactcctggacctggtccggctacctcctcccgacgtactacgacgaggagtacgtgtgcaacaacgcgtacgaggttgtcacgagcaccgataatatcccaaatcaaacggatgaggactccgactacggatacccgatgtatctgggtccgtttgccgcgcaggatttgaactgtgggtatgtgtcccaaggcctgacgccgggcgacgtgcactgcggcactcaggtactgacgtgcctcgagcttgatgcgctgcatgctctggggtatccggggtatacttgtgggaatacggagttttacatgcaggcttggtgcccgatggcagactaaggccggtggttgtgtaccataagactgaatattattgcgtacgagaatcggcgtcgtcatgtaatgtggtttaccccatcagcttttcgtgccatggagttggttttcccgcagaaaatatcccaaagcggtaactttctgccctggtggatccaacttcttctgtgcggtccaatattattggcatccacgaatatgaagcatttggcaccatacaaatttaattatctcaactttttcaggtggtttactggctctctccgtcatgcatgatgcatgaagcaatttgaattaattctaccaccaccaataataaacacggtttaattccaaaacagtcatttagatactatatggtagagagtagccaattgattaagggcattgttgcttatgcccccccccttggatgctcacaccctcccctgccttaaatttcagtaccgccttcctgatcgggtaccactcagaatactttattttttctgccatgtattctgcctacttctggtttatatagtaaaaagacatgcattttgattagaaaaaatcgtatattcaacctgatttctatagaattcaaccccttgctggatgagcagttgatataggatgtgacagaagtgacttaattttggtaggggtttacatacaaaccataggtacctgctgtcttgctactatcatatatgccgtttagaacaaaagcggtatacaaattaggaggcggtgaggagagcggtaggcagaagcaagtatcgaggtaagtgcttaaccaaattaggaaggcggtactgaaaattcaggcagggggtgggggtgagcaacaattcccttgattaaatgcgaccggcaattcatcataattgtagtaaaatagaattaaaaattctttattgttggtggtggtggtaccatttgaattacatactccatggtgatggctttatattcatatatgacggagagagctagtaaagcacctgaaaaagttgagatgattaaatttgcatggtgccaaaagcttcatgatcatcatagggcctggttaatccgtcccggcatcatttagataactacctaaaagcggtctaagataaggccaaaatccaggcatcaaggcccaatctgctgtcggagcgagaaatacaccagttattcttactgagaaggtgtgcacctttttggcctagtggtaacgtggcctgtttttctccgacatctggtgaaaacgacccctctttcctgccgccccgagtaaagtaccaacaacctatgtcggtcaaagcgaatatttcaagacagaatgagcaccatcgagcagtgtcctgctgagacaattgataatatcgtctcgtttctcaacttgcgcgatatttgcaatctccgcctcacgagccgcggtctggcactcagggtcttcggagccccgtctttcggatcccacctagagcaaagacaggtcgacgttacggagcgcagcctccgggccgtagccgaggcaacagcaaagcccggccgactaggttgcttcattagcgacttggtactggtcggcgtggtgaacaacactaaattcctcacgcaagaggtcaagtatactacaggggacgcaggacatcgcgcaaagcagcagcaggacctcgagatcctgactcgacggcaaacagagtatgaaaccctacatgcgtctcgcggtgatattctcctgctgagtcagatattccgcaacctcatggcccatggtaggcgccggggtctccgctccttatccctgacagtcgtggtgtatcgcgaggacgcgcagacgagactgctccccaaagacgggttcggctggaccctgatctggcaggctgccgccgacacgttccttacggcgctggcggcattcgcggcaagtgggatcgcggtacagcggctcgacgtctacaacagtatagagcggtgcagcctagcgtgtaacgagcctagtgccgtgaactttgaatacaatatgctagcgacgtcactcgcgtcgctgaaaacactcgccgtaagcttttcggatcgggttatcaatgaaaggacagaggatctcggcctaacaggcgacccatcggacacgtgggacgagcatttggaagatgagttgagggaacgtgaagatatagagaatgaggtgtatcaggattcgacgtttactggcctccccgccctggtacaacgctgccgggggctcgagagtctagaactccatcattatcaacttaaggatctgatcctctcggaagaggatctgatcttctcgggactcaaccggtaccgtgaacgattcttcccgtacatagccgagatgatcccgctacctcccttgaagcgcgtcgttctccgcggattacgggtgagatcagcagatatactagcctttatacagaggctacagccaactttaagagagctatcgctgcagcacgtgattctcctcgacggggcaaagttcgaaactatcttcggctactgcatatctgaggaggctggcttggagcggttgtacttggaccatttgctggagccagtagtgatggctagtggcgcgtacaactaccgtcgactggtctactttaccggggaacctaaccaggagcctaagctccggcgcagggacctcccacaccgcggtagtaacacagtggataggataggtgcagcacaaatcaggcggcctattccgtacttctcagtctctgtcccaatgagagaaaggggcaataggcttggcgcccattatccgcacagcaggccttacttgtctctatgtctttacgggcagcgggattatggacccccatgagtcggtacagtgatgtggcatgtgtatatatagtatagcttagatagtcgattgttttgatagagcacttcagggcagtatcaatctcagcgagggctacaaggatataggattgtttctcagtggtttactatagaggtttagaagtagactatagacgtactaagtcagcgccacgggaagtgtctttcctttaaaactgggcagtttcacataagcttaagggggcgaagcatgggaatggctttgtcaggcccgttggtgggcggtgatggcggtgagggagttcggtgctcaaatccccactggacatacgtcgatggagactcagaaaatttcccgtgagtttcagtctgtattcaactgccgatggcacagtttgaagacgataccacgatgtcgtccaaaaaagtaccgtgcgactcatgtcgccaacgtcgagtacgctgcgacggacttttaccttgcggcttctgccagcggacccagcttacctgcagacgtgaatacgtccggaaaaagcgcggtccgaaacatggcagtggaaagaagatagaagcactaagggctgctcaatcacatgtcaaggaatataataatagcgcctgccaaccagtggaggatctcctatctccagatcatttgccacggctgatgagacgctgtgtcgacgtctatctacgtcagatgtacccgatcatgcctcttttcagaccatctattctaatcgaatggctcaatcgaccgatggaaccaaatgagcaaactatgttatttgcgctatgcgcattggtcaccgcgtttatgtgcggtcgcagcgaatccattatcgggtgcggagaatgggcatcagtcgcgcatcggttgatagaaaagagcaattcggtgcggtctgaatataacttcgtcggggacagcactgttttgacgcttctagcatctttctttatcggagttacgcactttgaattgcataatgctcgacaaagttggttctacctccgcgaagctataaccttggcgcaggcacttggcttgcacacggacgagttctaccgtggcatggattatataagcgctctgtactgccgtcgaatttacaacattctgttcgtcacggagagatctttcgcagtagcaagacataaaccggtccttctacctcgcccgttgctttttcctgctcccgggccgaacgatcaactagagggcctagaagaacagccagaaattgacatcggattccgccagcttgtgcacgtttattcgcagatcgatgtcaactttttggacttctggagtgaaaaggagacaatcggcacaacccattcgacatggaaccttttttgcttaaagttgcttccggactgcgtcgtgatgtctgacgctcataaagctgatatctttgtgacccagcactggcttgacctggttctatggagagcggcccttcggcaggggttactttctaccaaggcgggatcacggtctaggacgttttcttatccacaggatattgcgttatccttactacagacattgacatcgctctctaaagagtcagtggcagtacatggactagggattgtatgtgtcacaacctgtttctacattcgcctgagctaaccgtacgtaccagttcgaaaaaatatacgacgtaggcaacactctggctgacttcatgcattgctcaagaaatttgacaggctggacagaggcaatgtcacagaacatggaccgactagactcaattcaaaaacagctctctctaagtccaaactcccacgataaattcgccctgtctctaggaggacgattggctgagtattctattttctttggtagcccttttaccatgtataatttggtcattagagacgaagatgtggaagaccaacgggatgcatacaccctggaatgaaatatttatagtcatgtgtatttaatgtgaatacggtcatcttaattgtggattatgtacaaacatgtctgatcccaaaattctcagttagtaacaaccaaattgttgtcataactaactacttgcggcgaaaccttcgctgaaattctcggagagatcccggggaattgttggcagatcaccccggatcgtcgagccaatcgctgaattgctcgctgaatctctcgctgaattaagtctctcggaaatttagaccaggaatttgatatcaaattataaatatccttccagagtgtgtccaaaaaaactgcatgccgaatccatgccgaacagttgaatcatggcctttccgactaattctgtcgccaaccctcgggccgtcatttctggtccgaaatatcgctttaccattctgaccgatttcttgattcggtacgagtgggcttctgatggatgtttcgaagaccgagcgtcaactttcgccatcaaccggcactttccgacgccccaattccgcgtcgtcgacaacgatggtaatctcgagatcatcgccgacaatttccacctatgttacgataagcaacgattctcccctgctggactgaacgtccatttcaacttcaaatataccaactggggggctccatggcagtatggactcgatgaggagctcaatttgggaggcacagctcggacccttgatctttgcgatggccgttgcgatatgggaaaaggagtgatttccaaagcaggatatgcggccctcgatgactcaacatctatgctcttcgatggagactttgtggcgggtcggaaaccgggtgatcgtatcgatggataccttttctgctacggtcatgactacaaagcggcgatgaaagcattctactcagtgtccggcaagcagcccatattaccccgatatgctctaggcaactggtggagccgatactatgcctatcaccaagacgggtatgttcaactcatggatgagttccgtgcacgcgatattcccatgtcagttgctgtggtcgacatggactggcatctcgtatcagacccttctgtaccccatgccggatggaccggctatacctgggataagaaactcttcccaaatcccaagcagttccgacgtgatctgcacgagagacatctcaagatcaccctgaatgatcatcctcacaatggaattcattcccatgaagatgcatacaaggaaatggccaaagctctgggtcacgataccggggaaaagaggccaattattttcgatccctctaaccccaagttcatgaaagcgtacttcgagatcctgcatcgtaatctggagaataccgcatgcgatttctggtggattgactggcagcaaggcccgtactccaaagttcctggcctcgatcccctttggcttctgaaccatttccactatctcgatcatggacgagatggcaacaccactccccttatcttttcccggtacgccgggcctggaagccagcgatacccagtgggattctcgggcgatacagtggtcacctgggattcgttggccttccaaccggagttcaccgcaacagcgtcgaatgtaggttacgggtggtggagccatgatattggcggccatatctttggaggcagagacgacgaactcgttactcgatgggtccagctcggtgtcttttcgcccattttccgtctgcattcttctgattcgaagtggaattctaaagagccgtggatgtatcgctcggagtacaagaaggtcatgtctagctttatgaggttgcgacatcgactggtaccattcctgtatacatgcaacgttgtcggttctatcgagaatgagcctttagtgcagccgatgtactggatgtttccggactctgatcaggcgtacgtgtttcccaatcagtatatctttggctcgaaactcttgattgctcctattgtcgatcctcgggacaagacgacaaacttgggggctgtcaaagcatggctgccacccggtccccggtttgttgacatatttactggccaattgtatgacgcagaccgggagatcacattttaccggagactggaagaataccctgttctgagccgtgaaggaactatcattcctatggatgccagcccagcgcccggaaacggttgcttgaatgtggaagcgttcgagtttcttgttgtcatcggcaacgatgctgaagccattgttttggaagattttgaagacgatgcacccaattcgacggcaggccaggggcaacggaaatttgctgtccacttcaaccaggctgacggaaagctgaccgccgaatcaatcgaccggccctcgaaattccgatttgtgtcgttgacgtccattccggacaacttgaaaatttactgtgacggcatcgaccggacgaaagaggttaaagtgtccgtcgaggagggctgccaggcccctggtctcgtcattgaatgctcattctccaaaattggtcactgcatcactattgaactcggtcctaatcctcagctcagcgtgatgaatccgatgcgccgtctcgagcctctgattatggactatcaatgtgagttcgagattaaagacaagttgtggaaagtcgtggcagaccacatgaaacgtgttaacgctatgattggcacgctgctatcgcttgggtacgatgactctatcgtcggtcctgtgtttgagcagctgttggcagatagtcggctatgttcgccttttgctaagcggacgtaggccgacggatcagctgtatgcacctcaaagggtcttaagtgtattttgactaagaagttcaatttatgatgcacgttttatcctcagtgtaatgcttgtattttctacaacaggatagactgacgagtaagatcatggtgtctacgcagaaaactgatagaaagatctgtttaaagcaatcaatgaagtatatttgattgcaatctgccatgatgatgtcctctaagcaatctaagtacgagtatctaaagagtaatatatcccagccctaaaccaaaaagactcttccctcaaacgcatgcaagtcctcattgtgcccatctacattgctagccaacaatttccaattttcgctcttcacggaatcaggtttctcaaacttctgtgttgtatttgagaagttgagaacaaccaaaatggtctggttgtgatttgtcttagtataggtgaagacactctgatttggctcgtcgaggatctcaaactctccaaagaccaggagatcggcatactcttttcgcagctgattcatctgtttccagaaggaaagaacagaagatgagtctttctcctggagcttcacattgatctcagggtaattgtcatgcgggcgcatccacggctttgccgatgaggccggtgaaaagccagcattggcatcagcactccactgcatggggagtctggaatgatctctcgccaaatactgcagagcatccatcgccttgcttaactcggctgggtctttgccggatttttcgcttatcatccgataatagttgatgctatctatgtctttgtattcgtcaatcgtccactctcgaggcgcgttcaccattccaatctcctggccctggtagataaactgcgtgccggagagagtgctttgcatcatagcaagcatctttgcagaccgaaccctcaactcgggtgtcttgtcagagccgaaccgactcacagaccggccctggtcgtgattttccatgaacactgtggtccatgcatcagtgcccttgatgatatcttgtgtatttttcacggcggcttttagttctcgtagattccagcccggaaaattggtctggaacttatagtccttgccctggccgaggtccacgatgtcgaattggaagaccatgctcagctgcttctctgccgctgagacatagctcagaaccccttccaaggtatgcgtgtttggcaattcaccaacggtcattgcatcgtatttggaaagcacgtcgttcatctcgcgcatgtactcgtggatgcgaggaccgttgcagaacagcgagaaagccggttgtgtgtcggactttggatcaaggattggagcattgggatagtcggggtgcttgctgtacatgttgaccgtatcgacgcggaagccatccacgcccttctgcagccagaactccatcgcatcctcgtagactgccttgcgagtctcggggttctcccaattgagatcgggctgctcaacacagaacagatggagatagtattcttctgttgtctcgtcccactcccacgcactgccaccgaaaatgctgcgccagttatttggcggctgacgatttccgttcgcgtcgtatttagctggcttccagatgtaccagtcgcgcttggggtttgtctttgaagagcgggactccttgaaccatttgtgctggtctgatgtgtgattcacgactaagtccaggataatccgaagtcctcgcttgtggcatgcgtcaatgagggtatccatgtcctggacagtaccgtatgggccatatacgcttttgtagtcggcaacatcatagcccatgtcaatctgcgggctgtcgtacatgggacacagccaaattacatccacaccaaggcttgtgatataatcgagcgatgagataatccctgggatgtcgccaatgccatcgccattagaatctttgaagctggcggggtagatttggtagatgatggagtttttccaccacttttcggccactatagagggagacatggtgaatttaagggatttaaatgcaaggaatagtgatagaagaagaaatataggtccaaaatacgaaaaactggggaggctatatatacgtgtctaaagcattcgatttttgattgtcattgcactacctgctcgactatggagtctccgatatcacgtagggagggccattgctctcattgactcgatgtcgggccgacgatcatttcagcagaatcatgtgcccctcatctgcctgcgggtctttctgtgctgaacgagggttggtggtgtttcagtatggtagagattcccacttaatcccacgatccggaaagcataccgagctctccaaccgcctgaccatatcagatgccgagattgtctatgccgattcgtctcttctttctgggcctaactcacaatgcgttagttcatcgcagaaatgaggggaacagaagcatgtcgggccgacatctcaccaatgatcccgtgatatcccccagccctatctaaccggatcgggaaaagcaacagccctaaaacggccataagaaacacgcgagacacggctggatgaaaggagccaatgcggtgacaggactaaatgcctcttcattcctgcacggcccgacatcaggccaatcacgactctcccagaaaatccggggatagtgggccaacctataccccatgctggtgcagagaaaccggggaaagtctgcacgcgccacaactatcgcatgtcaaatggattaagcaagaattaagctcgacggacgaatgggccaatggaacggtcctttcgtcgctcgttatggactactgtcgacgaccattagcagcacggttttgcatataaatgcccaacgacgcccgcatggaatacttcttctatccagtcctgtccaccttgaacaacaatctgaatcatactcagagcctccattggcacatctcagcaatggcttctgaaaagcaagccaccgatcatgtcgagacatatacagatgtcaagccgggctacacagacctccaaaccagcaccgaagcccacgccgccatcgaaaaagaacacaaaatgaccgccatggaagccctgcgactctactccaaagctgtagcctggtccctcctcctctcctgcgccatcatcatggaaggctacgacgtggtcctgatcggctcattcttcgccttcccagccttcaacctgaaatacggcgaactcatgtcggacggcaagtacggcctcgctgcctcctggcaagccagtctgaccaacgcgatgagctgcggccagatcgtaggcctctttgtgaacggcatcgtctccgagcgctacggctaccgcaaaaccctaatggcctgtctagccactaccgtcggcttcatcttcatcctcttcttcgcaccaaacgtccagactctcgtcgccggcgaactgctcatgggaatccccctcggcgtctaccagaccctgacagtcacatacgcatcagaggtatgccccgtcgcactacgcgcctacctaactacctacgtcaatctgtgctgggtattcgggcagctgatcgcttcaggcgtgctaaggggtcttgtcgcacacaccgaccagtgggcgtaccgcatccccttcgccatccagtgggtatggccggtgccaatcttcatcggggtgtacctggcgcccgagagtccatggtggcttgtgcggaaagacagacgcgaagacgccatcaagtccgtgaagcggctcacgcgcgcagaccccaatttcagcgcagaggaaactgtctcgatgattgtgtatacgaatgccatggagcagcacgctgagactggcgcctcgtatattgactgctttaaggggaccgatctgcgacgcacggagatcgcgtgctgtgtgtgggcggtgcagagtctatgcggcagtggtctgatgggatactcgactgtcttctaccagcgtgctgggctggcggacgagcagtcatttaccatgtcgctggcgcagtatgcgattggggttgttgggacgtttagctcgtggctatttatgacgtactttggtcggcgcacgctctatgtgggtggcctggctatactggcggttatcctgtttgtgattgggtttgcgtctgttgcgccggcgactacgtcactctcgtgggcgacggggtctatgctgcttgtgtatacgttcgtctatgattcgactatcgggccggtgtgtttctcgctggtttcggagatgccgtcgtccagacttcggacgaagactgttgtcctggcgaggaatgcgtataacgtgcttaatctggtgaccgggattattattccctatatgctgaatgtggatgcgtggaattggagggggaagtctgggtttttctggggtggactgtgcattctctgtcttgtttggtcgttcttcagacttcctgagcccaaggggcgctcttatgctgagttggatgttctatttgagaacaaggtgcgcacaagggagttcccgtctgcgaagacgggtttggtgcagagtgagctcgaggggacgaaaggctctgtttgaggctaatatctgagagaagtattggaagcatagtgacatgtagtatcgtcagtgaaatgaaatctcatcttgttgtaaccaactcctgagatctttgaacgccttggtagagaatattataactagaagcccatttacgaagacggtttctttcaaaacttctaattctgctaggaaatgctgttcgtacacaaaagaatatttgcaatcaaaaaaaaaaagacaagaagcagatgagtataatcattagaccaggtatacgccacctatgacattgaaacaaggaaacaattttttaagatcccagtcaaaaactgatatatcagttatccaccaagaacttcattctgatacccatagctgccaactcgacatccaagtagcgcagcacaccaggcacagcaacgatagtaacattgtcaccaccgacgtagcggtgaccatcaccatcttcccaaacctcagcacgggagtcatcgaaggtagcctcacgggcacaacgacggcaacgcacaacaccattgacaccgccaacagcaccaatagcagagctagcatgagcattggtgttctgctggttaggagcagccttggcagccgcagccgcagcaccagggttgatagtggtgcgagaacgggacgagccggaaacagcaacctgtgtggacaagaaggacccacaggagcgacagatccaggtgtgctgggcgtcagagcagttcatgagacgatcctgcagcaagaaggccgcaccgtgagcaatgagcgaatcacgctccatctctccgacacggataccaccacccttcgcacgacccttcacgggctggcccgtgagcgcgttgacgggaccagtcgtacgcacttggaacttatcgttcaccatgtgacgcagacgctggtagtagaccaggcccatgtaaatgtcggcggagaactcacggccagtgacgccactgtacatcggctcgttgccgtagtagttgtaaccggctttgcggagctgctcaccgaagtagtcggttgcggtgttttcttcggagaattggaagggagttgagtcttgcggtagaccgtgcatggcaccggcttttccggccatggactcgatcatttgagcgattgtcatacctaggatatgttagatgggaataatttgatattatgagcgatgggagcttacgggatgggaaagcgtgagggttgatgatcagatcgggctgcatgccactctcggagaagggcatgtcgactgcaggccagagttgagacaacacacccttctgaccgtgacgagaggagaacttgtcaccaatgacaggcttgcggggaatgcggtacttgatactgagcgattgagcaggctcgttgccagactcggaaccgatgattcggagactctcgacgtagccttcctcggcatccttgtatttcatgtaatgggtgattccatcgacgttaacgtacgagtcggaggcgggatcgaatcgcacactgtgccaggccgcgatcttgtcaccttccttgacgcgagcacccaggtgcggcatgccatcttcgtcgatgatgttgcgcacctgctctttgacctcgtcgccgggggcaaatccaaacagcttggtgacctcacgcttggacttattccgacgggagtcgttgtcggctaaagtgacgaccttggtcttatagactgtaccgtgaccgaagccacgttcatgtgcggacttgttgataatcatagcgtcgtccatgtcgtatccggtgtaggagataatagccacaactgcgttcataccgttggggaagttgtccagaccgtaggcgttgtagagaggtggtcgcacaatgggcgtttgacccgtttggatgcggtacaacttgttgtcagtacggtgagcaatcgaggtacctggcgtacccatggtttgtttgctcatctggcactggtacatgttacgtggagattggttgtagtcggagaagggggtcatgttcgcgacaatagagaggatgttcgtgggcgtgaactcaatatgggtcgaaagaccgggaatcaggtcagactccacacatgcaatctccatgaaaggctgctcgaacggtccgacgtaatccagcttatccagcgccaaatacttaacagggcggtacattctcgctgattgggagaacatgtagacacctgggtattgtccaccgcttgagttgggaatatatccaatttccaattcacgagggatgttgtttttgccttcgaccttccagtaccggatggtatcggcgattctctgggcctgcttgggtgagcagtaaccaatgattcgtccatccaactggacaacaacgctctcgtccagagccacggaggactcagaccggacaccaagttgaaccagagtccgaggcagatcagatacatccagattgtcagtagaaatcaaacacttgtgcgacaaatggttgagcagaccgcaaggcgatccatcaggagtgtggacagggcaaaggaaaccccaactttccggtagtagtttgcggacagtggtagtcttcaactgggcgaagaaactaccacggtgaatcatgcggaaatgactgatgaaacggtagaagttgatcttctctgcaatgacggtgtaacctgaagtttgttgcaaatcaagaccagtaggactgatcaagttaccggtggagaggaagtactcgagtgcattaccaatattctcatttgatctcttgacgatcttagagaggaagtcgcgctcaaatgcttcatcagtgaaccttgcgccgttgttgcggatggaccagtctctggcaatgggaccgaatgaacggagccactcctcgatacgttccttgagaatcattccgtaaaggaaaccaccaagcagaatttcctggttggagacggcatcgggattgtcgggggcacagtctcctgcaactgtagagtaaagcttgcggaccataaaggtgatcaacttgaacttgtcccaatcttgcgcctcggtgacatgctcatttccaagatgagggagaacaaccttacggaggaactctgtgccaacttcctcgtcaggcatgtcagcggggactccgagtacaggtcggaaagccttgcccaggtgagatcgacaatcgtactggctgtgcttctggtaggcgtggtaggttctcaacaaaagctcgacacggtccgtgacgaaagtgttgttcatgcccttggaagaagcaccaccgacaatggcctcgaagatttcgcgatcgttagtctcggcgagtgccttgagaatcatcatcacggggataaggtattcattcttgcgccatgagaaacggaaggtgacatttccgtcggagaggtagtgaagcacgtttgtctgcgacgtttgatcgggacggaccgatcgtatttgaacaccgaactttgtgtaagtctgcccacgcttgacgaaagaattacgaatgatggacatggggtagttgcgcttgccgacgaccagcatacgaatgagcttctcgttaccgttaacgatgtagaagccaccgagttcctccgattcttccttgtgtcgaacaagctcctcgggactagcatgttcgaggtgacaccggttggtgcgcaccatgatcgggacattacccagctcgcggatagactccatccagtctccattgttgacctggtactcgaggcgagcgcggagcttgccacggtacgtcgagtggcgctctctgcattccgaggggtagatttcacggtttcgggtggtgtacttgttggttgggggcagggtaggcttgtcgaggaagatttcacgcacgcggacgttcaagcgattccgcttcggtgggcgaacgccttctgattggcgggccttcttctgctcataggtctcgagttccccatcgaggaaagtcttggtaccgatatccttcaatcctgcctccaggatcttgctgtcttcgaagagagcattgaaggaatcgatatgcggtcgaatcgactcggccagcgatggataagccgtgtgatccgcgggaggattcttgaacaggttctcccgtcgcagggtgtcgtattcgactgaccactgagtgtctgtggctgcgggcgccatgatggaaattcgcagctcttaaaagtcggttgatgcggtatagaaaagaaagactaaacagcacaataaatgtgacccttatatgtcaagataaaagcgcgacaatatcggttctattcctccgcccaatattgtatcagccagaccacaggaattgaaccgacaatggcagctgccaaaagacgagagatgtctgttctgcttggggaaatttttcgagggtggagccagacgcttatcggcacgtggtgatatacattgttggcctgaggcgcccaaatgaggttcaagtccaaaagttcgacgttcaccgttcattaactccctaatgccgtactgaaactctagtttgactgcaagctcctggcatgattatgaagccctaatcccagtagactctagattgatcaaacttgcaccactaactgctagaaatgtgggaacttgtaactacgccacacgggctggctatgctgcacaacgccattcaccccaagctgaagccaatggagactaagcgccctgaggtcatgtgtgtaggtagatcggccacttctccatagacaaataggacgttgtgtagatccaatatccttttctattgacatctgccggcggttatccccttaaaacatcatttcctctaataataggccttttaaattgtgtcaggttgattttcttgcaacggtgtggcgatcttgttttctctctcttctttttttccctctttctctcacctttcatctcttcgtcatatcgagacatcaccaaggatatatcaacctgttgtgcagttacaaggtcgaccccactctctggcttttgtcatcctgagctttttccacacacacgaggcaacttcctcttaatttctctggcagctttcttttttttagttctattctactgtattgtctcgtttctcttccctcctttttttcattcctttttcataaagtttcgcctctcttcgtcatggccggtatatttcgtgctatctatgactggcttctgaggatgttctggtaagtgggccgtttgatatatgcagtgttcgggtgaccacggcccgtccccgcagatgaagccctgctaaaactccatacagggccagcgagatggatgtcaccatgatcggccttcagaatgccggcaagtcttctctgctgcgtgtgttggcggtaagtcgatctgataaagtcctgacggggtgttgctgaccataacagggtggagagttcactatcgagtaagttatagatggtctcacatctgagatcatttcatctcggccatgtcctgatcgtcttccttgtagctccatcccaacaatcgggttcaacaccaaaagagtgcagaaaggccatgtgaccttgaaatggtatgttcatccttcccgattaagcccggcggcgctaatatatccctcgcagctgggatctgggtgggcaacctcgatttcggccgatgtgggaacggtattgtcggggcgtcaacgcgatcgtgtaagacttcctgctttccccgtcccatctcttcccggcatactaaccaaggtgaataaaggtatatcgtggatgcagcagaccgcgctgcactcccagtagcgacagaagaacttcacgacctgatgaaaaagcccacgctggatagcatcccactcctggtcctcggaaacaagtccgatcttccagacaagctgtctgtggatgagatcattgaggcgatggatctaaaatccatcacccatcgcgaagtaagctgctacggtatcagcgccaaggaggaaaccaaccttgacgctgtcctgcactggctcattgctcgagctagccggtgaggatactgtcgcttgtgcctgcccgctttgaccttcaaccttcaacctcgactcgcgatatcccttttgtttttcatacccttaactgtgccgcattttgattgtgttcatatcccgtagactccagcgtgtttggcccgcagcctcggatgtaacgatgttgacgatgtagtcttcttttttctgctcatggattctcgagttcatgattatgatgtatgtatgttaatggtgatgtgcgcttgtttgagccttcttttttcgtatcgttttttccttggtcgctttcttcgatcgataagtattagggtgttttggcaatactcatgggggaaaaattgacagaaagtcgatctggggatggccgacataaataaacaggggccaccccggcattgatgcgttggctgccaacgcatcgatgcagacgaataaacctccccgccaatggacgtctcacattaaacacatattgattagctgagagctggaataataattcattgtaaatcgttcggatatcattactggccactataccatacatctcttttcgtactagtgtgcaccttcatgtcttggatattattctcagacaaatcaaatcaagtggcattagtcgtacacaaaatatctagatcagttttgtaggtccttccttgcagacaggccagatccggagttgctcaaaaccccctttgaagcgcccaagatagcgcagtaacgcccgtaaacatcaataaacgaaaaacctcacgagtgaaatgcgaagaagatatggaatcatttgcaacgcttctctacaatgttcggcccatgctcctcgtactccttcttggatatccacatctggtggaaagttcccaaactagccaggatacttcctccaatccaggagccgaagcgtcgctcagaggtgttaccgggagcagtaacacggaccctggggccagggaacatttgcatcagctcgtggtttagacgatcagtgaagccataaagcaagctggatccaccggttacaacgacattagccagcaggtggggacggaggtcgacgtcaacgccggccaaagaagccttgacaagttctgggatagtctgagcgggtgtcgggggagggaaagccgagtcggggtctggaatagcagctttggcgtcgaacagagattccactgcgcggaaacggtcaacaccgaagacttggttgtatccatcagggaactcgaatggacgaccaggggtagtgcgagccatgtcttcgttagatacgcccgtagggctgggggctgagagcctcgtaggtcctggccaaacttggacgacacattccttaaactcggacagtgtacgctcctcaagcagagcacggtacgacgcatcgggtgccttgtctgcggggaaggtcttgtatttcacttggggcggttgtccggcttcgacggccgatttcgagctgataaggtaatgcggcgtgattgtgatgggctgtggggagttggccttgaaaattgccttgatctgcgacgagatgtaatcaccgcccaacggcgagtgctgcacaccccgtttcaggatcatgccatcgtggatcggggtaacagagatgttagaagcgccaatgtcaataacaagggcggaggccttgccggaagcgaaactgcgcatggaattgggtcagcaagtggtacacatatcatagttaatgggtggtatacgtacgcagcaagaacaccagtacgcgcgagatagaaggccggtgtatcccatttttccattgcgatttcaatggtcttttcgcgtgccttggccgggttccatccaggctcggtcatcaacaatgggctgtccgacaaaggcttctcttctgactccacctccatctccgtagggagctcgtctgcagaaacgtcgtttaatccgttctggaacgggttgcccgctctcgttccggtgagtcgcgaaataaatgagtgctcccacactttctctgccatatcccaatcttcgacgattccatccttgccgattgggttgtagatggacagaccgggtcgtggggtaacgaatatgtcgtcgccaaagacgagcttctcttggccgtcggcgttgtattttccatagtaggttggaatcagtgacttgggagcatcttcaccggcaaagcccgcgcgagtggttgaataccccgggtctaggacaattgctgacacctcgtctatagtcgcgcgataattagcatctcgtacggtgaataggatggaagcgttctgtggaatcgcagcggcaggcgcaattgggatgggatatctgggatcacatacctccaccatactcggcagcttgaggtgggttggaagggttcatcgcgaaagttgtgcaggtatatctagaggataagggtcgcagctgtcacaaggatcaacgtgaatattttggtttaggtcgcctgaagaaagtcaagacgtgaccatgtgtatcgcgcagacaactagaggggctggttggaggcaggagaagggcgggtctttttgctgcgggtggtgtagctttggctttggcatccaaacgggcagttcaagatcaggcttagtcattccaggtgagcagctgtgctgactaatcagggccacaggtaactacctaaacagagggctttaggacattatgcatggcccttcttgagtcacatcctttttatggttaaatattgaaagtgcacatagtatttctttgaagacagtgtcttatacgagaaaatagagataaactgatgaggcggtgtacataatccgaaatgaagcaaaaagcatctataccgaagaacctaacgaacaagatatcattctatttccctccttttgcttgtgtttgtttctcgcatctcggtgtccttatatgttacttcgatgataggccagaaatagcattagcccgggattattacggtatcatacatgtcgagtaaaaacacacgccgcagagggccaagtgcataaaagtacatatcaaagaaaatcagccgtttcagatgagaataacaatcatttctttcccgcctgtgcttctttctctcgcattgcagctcttgcactgcgactgcctccaagcttcggaccccgaggcgcttcaacattagccacgggttttgctgcaggccgagtccgacgccgagactgcatcgcatccataaagtcgcgcctgaattgctcagcaactcggtcatcagcagcttgttgatcatcaagctgtgtttcctcttcttgttcatcatagatttccactataacagctagtgttagcaaagataaagatcctgtaaaattcactttggaatgccacgtacatttgctctcacgtagtacctcctccacaagacgatcccttgcgatgtctgcatctgtcctctgtttgcgattgcgccatgacttgccgtctgggttagggcgacccgtctctggagcagtatcaaccgatgtcggcaagcctccattctcagtcatttgtcgagtcgcagcctctgttcgcgcaatgtttcgcaatgtggcttcttggccgaggtcgatttcatggagtttgcctagcgacgcaggttcgcgtgtctggtgtccaggtagcgacaatcccccggcaacttcctcctgggttggttggttggaacctgaatgatctgcctttgattcaggctggtagcgcttagccatctcggaatctatgaatgccatccttatctcgttagtccacaccaaacgattcggacgatcagccgcgggaaagaatccgtacatgtgtttgtcaacatccactgtttgaccagtatatcccgtgaaacgttcattcattgcttgtatcttctcgttttcagtatctccagccactggtactagcgctagttgctggccctgatcatctcctagccgtgacgcggtagaaaacccaatgccgccctttcgaattgcgcgtggacgccgaagattattgctccccagagcttgtgacgcgccaggattatcattttgattatcggcctcttcggtgtctaggatctcatggtcgggacgtcgtcgcatgaacttgcgcttttttgctgggcgaaacagggattcaattggcatagtatcttcctgcgtgtccattgtgatttgcgacaatgtaaacttgggtggtaggggaaacgagcgggaaattgattgtcaaaggtgaggtcattgagcaggcaaactacaattcgccgattattgaccgccttctattctgccaaatttaggttcaaactctaatgtgacttggacctatacaacatacaccagatgtgatgatagccaataatctgccctttccatgactactaccgtgatagaaatggaatatccaatcacattgatcgtaaactttatttttctcaaggacgttgatattagaatacattattttgctttgatcagttccgattcatatatcttttcactgattcataatatagcaagggaaaaaccgtctaaatttcacaatgtatagccattcaaacaatccatcttacctggtcacgggcctggatgtcatcgttttgcggttagagcctctcaaggctatatcttggaaagaggtcgccaccaaccttggaagattctctgtgtttataaaatccacttcaattaactagccagagccagtatctcaaatcgaattaaccgaatagccatggtattacccagtctaactaatagtatacctgctcccaatttattacaacatacttcatatgtatttgccttggacagaacgaagactctcatcaggaggcggctgggataataataacttggctttttaacaagcaatttggacatactaccccatatttctttcatagaagagccgggagcttgtaacgggtgatattgttttaggttaaccacagatgatttgagacacgtaagtaatcatcgaaatgaaatgaatctcgggaagtcgaatctcaaaatgccgtgctccatagttaaacgtcatctaccactaatactactactactagttagtgtacctgatttctatatgatttttgcacacccctaattcctcaccgcactcaccgcacacctatttaaactactgcggataaggcgctccttagccagcatttttcgccgaatctgtaatttaatagttaattttagaaagctgttcataccatttctaagcaaaatgcatttctttttactacgtatgtgaactaggagtgggcagaatacggtagaaaactctaccggcatatgtcgcacccgatcaggaaggcgatgactgaattttcaggcaagggggtggccataccccggataatatatatcctagcagctgcttctgtactattgttcagccaatatcagggctctaaaggtgagatctcgtaagagacagttccctagttatagaaacgacaatagtgatatcatcttgtttatatcacgggtgtgtcacggactattttctaacattaatgtctcagattgctcgtttatctctttccagtaagaattaggtggcaaatccatgttctgttcagatcctttgtatattctgttattcaatcctaatcctacccgagtgaagaatctagtcacatcattacatgtaggctcagatcaggaggggatcggcaagggttcacaaaagatgtggctgataggatgaatgcgaagataagcaaggccgtgagataatctaactattgtaagtcacgatccgtgcgtctggtacagagtacagagtaaaccctaagattctcacgggagagagcttgctagttcctcgaaaagacctccgcacgacccaaaaaacccagatgaacctagtctgggctgggtttcgggtcgtgtggaagtctagctgagtaataatatgttgaagaaaagaagaaagaaggttgcttggcaatcctcagaatttccgagttcgggagttctcaggcggaaatcgtattccgtgatataagttcttgtccaatctagatactgcatgataatacatccatcgtatcaggaacatgaccccgggtaggtcggatgctttctggcctaatcaaggattggatttgatgaatgctgcaaataatcaaagtgtgcagcacaccgctggagagaaagccgagaatacccctaggttagggtggctggtttgttgagacacgaaggcatccgtcgcacgaagtacggagtagatgctagcatgttctttagggaaacggctgacagacgtttgctcaattcgcccatttggctattggccaggctttctacctcggtcatgaatatctactccgtattagaccccgcaaataatgttgaaatctctgactgtttgtgacccgaatccgtccacggtgtggagggatcccccatcttgccccggtcttgagctcaacaatattcctcggacatctctcgggaaaaatgtatccaccagagaataatgcaattgttatacggagtacaacatacatcgcaagggatatcgtggcttgcctgactagatcgagacttttattttatttttggcaaagtttcaacgcctcaatgacacaatctcgcacgatctggagggaaccttggaagaaacagtcatcaaaacagagcattttaatttgtaaagctttgtgatgtggaacaatgtactccccgacaaatccttcgattttaattaggcgtgcctgtactccacgggcaaatccggagagtgaccgagatggtggggtgcatgagaatggaaaaaccccagcctggaggtgagattcaaggtcgaggttatgaagtcttggcacttggcacttggccggagtggataagccttcgggactagcccaagcctttcaatgccgaggccggcggtccgagtcaggcaatgagctaccaacacgcgagaccgaaaagacccgggatattttatgatggcatttctcggaaaataaattactccaaacagcttcatccctacttccccattccatgtggcataattcgagcgagaaatcatggggaggatcggcaccccgtctgggctccgatattcggcatttcctccaatcagtccgggcgagcaagccagatcatcccgccacttaactcttattttcggccccaagcctcgtggatctagtccggaagcggtttcttcttcgggagtgacgaagctgcgggatccttttacaccgggaccgggaccacatctaccccgtggagtcggcgatgtgaccgagtcacaggacagaaccggtcacggattttattgaaatttgcccaaaacttgccacggtggatatggatatgctatccactgtggaattcccccatcccacaggtacaggatttcatttttctgatgcggggtctccacgagaagggttgaccgaaaacagggtataaacccatggagagaccggcctccattttctctctgtttctctcatccctcagagtggcctttcacatacacactctaacatggtctcattattccgaggaaaagcgctgagcgtagcgcaggcgttgctcattgtagcaccggccttcatcgtcttcggttacaaccagtctggcttgggccctcttgctacattgcagagctgggtcgaagtattccccaaaatcgacacaatcaacacatcgggcgcccaacgcgcgcaaaactccacaggcaagggtgccgtcatcggatccttccagctcggtgctctgttcggagccttgtcgtgtacattcctgggtgaccgcctcggtcgccgcaagaccatcttcttgggtggtctccttactatcatcggccaagtgttgcagactgcggcttatggcttgccacaattcgtcatcggccgtatcatccttggtctcggtgtcggtcagatgagtgttgccgttcccgtgtggcagtccgagtgcacgtcagccaaacatcgtggacagcacgttgtcgtcgacggtatctgtatctgcttgggttatgttctttgtaactggattgattttggcttgagcaaaattaccggcgcattgcagtggcgtattccattggccgtttccatcttcttctccgtcgtcgtcgtgttttcgatcttcttgctccccgagtcacctcgatggctcgtgcgggttggccgtatcgatgaggctaccagcagtctcgctgcctacaagggtctacctgacgatgatgaggctgtccacatggaaatcgccggtatcgaagcttctcttgagagtacggttaacagcgcctccatcatggagatcttcacatccagcaaggccgacgatgagcgccttatctaccggttctgtctatgcgttgcactgcaattcttccagcagatgtgcggtggtaacttaatctcgacatacgtgtcgacaatcttcgaagagaacctcaacatgtccagcgacctggctcgcatcctgtcttcatgtgccatgacctggaagttcatctgcagcttcatctccttcttcgccatcgaccgactcggccgtcgaaagatcttcattatcagcggtactggtatgtccgtctgcatgacggtcctcaccatcaccaacagcttccaggacaacaaaaccgcatccattatttcggccgtctttatcttccttttcaactcgttctaccctgtcggtttccttggcggcaacttcctttactgtaccgaagtcgctcccatgcgtctccgtgtcgccatgtccgccatctcgaccggaaaccactggctgtggaacttcgtcgttgtcatggtcactcccgtcgcactcgacaccatcggatacaagtactacattatctacgctgtcatctctgcctgcattccagtctcggtttacttcttctaccccgagacaatgaaccgcaacctggagtccctgaaccatgtcttccgcgatgctccgaccgcgtgggatattgtctccatggctcgtcacctgcctcaaggcgaggctgctgaggtggatgtgtggaccgggaccgatgaaaagggcgagaagagtgaaattgagcagaaggagaatgcttgaattataaattaaatttgtcgagaccttaccaactgtatatactatgtctgacgatgatgatgatagaatgagttgtactaaagtacaatttaaataaatgtgatcattagattgagcacatcaagaatttcatgattccatatttcattcatttcccttggatctcctataagcaccgtaagtaaatacaatccggtctctgaagtactattgctcctaagaacttggcgtagtcaagtctcatatcatcccaaattgggagattaaacatagttgcctctttcactatgagacatgatatacatagaggttatgcatctcaattcaacataatgaattgtttaagtttatgtgaaaggtggtattgataacccttttaagaacttcaagtcaagttctttgtctcttactctatctataaattgacatactatgttattttcattgatatattctcgttcccattgtttagccaaggttatccgctctacttcgagtttctttgtctttcaaggctacgtttacatccctcgagtcttcaaggtgttgttgattgttcatcctttgttttttattctttaggccgatttctggtgaattggtgtttgatcacgacaaaccttgtaactaacattaaacccaacaaagagcattcaaatatccagtatcagctatataatccccctctgtatgtctcctggtcttcatttcaagctcattatccaacaacagcaccaaaactccatatatctgacttcaattgtttgagttataccaatttctaaaatcaccaccaaagatgctcaagaaaatccggcactcgctgagatgctttccaagacaccggtgtgactgtgacgatgacagtcaatgctcgggagaccaatctaatcacccacgggcaagggtaccaaagcgcgccctgcgtcaaccacttcctaagaatgctgcgaaaagcgcggctccagctaaccagcctggtgaagatggcagcgaagatgaggatagcagcggtgattatgatccccaagctcccccgcccagcaacgttcctctgtccaccaagggttcgcacacaggcgtaacacctgcgatgagtgagacaaatcttgatgagtcttcgtctagcgatgacccatattccccctcaaccagaaacccctacacaaacagcccgggggtaagtgatactggttcccacaaaccttcatctggcgacgacttttattccgtcggaacaaagaattcacacacaggcattagtctcgagatgagtgatcccaaccccagtgagtcccaatatgaatcattttcagattctgaagaaagctcttctcccctgagagcgtctggtataagtgaatacaataccgatggagatgactataatggagctgacgatgaaagcctcgacctagatctggatgaagtaatgtacgatgcggaatactccagcggatggtcgagcacttctagcgacaggagacgccggcgttctctagatagtcaagcgcaaaccgatgctgaacacaggggtctttatggatccagaggcagtagcggcagcagcaaacgccagcgtcttgacgactcatccgacactgcaagcggtagagtgagaaccggcatcgaactgacagtggaggacgtcaccaggtacagaaataaaggagcccaataccaagcatggattgacgacccggaagagccagggtgccaaatccaaccggcaacattaaatatagaggagatgattgataaaaaacaacaggtgccttggaaagtccatgaatcttatttcatagccgagcctatggcactacaaggcggcgatgttgagtcgatgaatattgatcgaggcggtccgcgataccgctacacacacctccgacaggatccggggccaaacacactcgaagctaacgaatttgagcatcgggttactcggggtattattattgccgagagactctatagggaagacggtcctcattggaatgaggtcgctcgagcccaatacttgcttgattttaatttgaatactctgaggtatgttgtctttactgatatcgggaacgaagaaacaggtccatatatacgacacgaactataccctagattgggtgttagatggtcacaggcaagagacgttgagtgtatgaagtttgagcatggtagtgctgagtatcaagaactcctcgggacaaagttgggtaaagctatggcttgtcttatcctttcttcattccctaggggtacgatgaagatcactcgtattgccacttggtgtaattcgactgcgccgcagatgcggttcgagattgaacctgttattgctgcatgagatatatgcatatatttgtgctgatatttgattatttagattgttgttagagtcagaaattgagattttactaaggcccctgctgtaatagacaagataggcattagttgggtcattcatacaattgggatgacttccaagctgaacaataacctgaatttgatcttgaataccgtcctgtaccatacataagctaactcattgctttgaaaagaaaaaaagaaaaagaaaaagatatacaattaataatagtcatgccttgcacagaagttcgagtccgatattttaggaactcgtgagagatgctcaagcgaagaacttatacaagaatgaagacaatcactgtcacaaatagcaaaaaagaaaaaaagaaaaattgaatacatgagaattggaaacaatataccagcaccagtatcatacggcatccgcaatgataacctcggcagccttctcactgatcatataaatgggtagggcgatatagtaacctggaatcttaggaaagaccgaagcatccacaacacgcaagccgtcaaccccacgaacacggaagtccgcatccaacacagcctgaggatctccatcttctccaattgcagcagtacagcaggcatggtgaccccatgcctcttttttaatgaagtctttcagttcattctcagtagtgacattgggtcccggccagacctcttcaaacccgccatcaaggggaataaggtcatcgaatattgtgcgggagaactgcattgcttcatatacagcctgcaggtccttgtcatctgcaccatctgtggtcactccggtatcgaacgagtggaagttgataaggggcatgtcacgcgggtcggtagagcgcaactcaactgtaccagcgttattgcgagagcgcgactttaacgtaatccaggtccagtgctgggcatctttgagaccctcgtaggagtagttgggataatagccggggaagttgacgggtgctcctgagatcagtaggtcgggctcatcttctgcaacagacgacttgcgaatgatggcgatggcgattccattggtggtatatgtacctttgaacaaaggattgttttcatactgttccaaacaggggtcgggaagagaatacaaaaaggtacacttcgatgtgaggacgaaatcggtgggtgacttgcccactgtacctatttcgtaccgatcctgaagattacgaccgacgccggggagattcaccagggttgagattccaaatttggacaactcctcctttgggccaataccactcagcttcagcagctggggggtgttgaatgagcctgcagacaggatcacttcacgagaagcactcacgctacccggtgttccattagacgatgtctgggaagcccgggggtctgcacggtagaggctctgtcctcgaagatagtcaacaccggtagcccgtggcttcgctccggtggtatcgaaccggagcttggttaccaaggtgttcaactggatatcaaggtgatactttcgcgaaccatccgagtttacagcattgactgtcttcatgaggaattctcgaggacctgtccgcttatattcggggacatctacggcgagagggacttggtatggaccctcctcgtagtcacgcgaaggaagggggttgttaagatcacgcagcagaactcgggcgaggcccgtgaccgtagtgatcagtttgcccagcagtgtttgacccgcggcggtcgcaccggccaggatcaaggacagaagcttttggtcttcaatgacaagacgcaggtctgtgaggctcgttgtaagccatccgtcgaatccgtggcctatgatgctgctgggaaggtatcggttgcgctctagtctctcgaagtattgtcgcatattcgaggcagaccatgaatcattgccagtgagactggccagttgctcccagtcattctcgtacgggtagatcgtgctataaagatactggtcagtatatgatagatacatccgatagacatgcggagaagatatggctcacatcatggcattatgagcagagcatccacctaaagtaccggctcgagggtataaaattcccaaaggttcagacccattgggcgcattgcttccaacatggaggtcaccagcaggtgtccggtaagtcattttgctgtcttcttcctgacgagtcaagttcgagtagtgattcacgaaataatcccatctcatcggctcgtattcggtggactggagctgcagagcggggacaatttgctgagtcgcatttccctggtcatctcctgcttctagaagaagaaccttgtagcctgcaatggccaatcgtgccgctacagggccacctccggcgccagagccaacaacaacataatcatattctgtggtggagttatccgaagacctcctgtgtgcatcatgatatcgatgatccggtctatgatcactatattatgttagttttccgtgtcaacaaggtctgggtagagaccgaaggtgcacctacatagctgagacaattgaaagagtggaaaatagcccaactaccacaggaaaacgcatagtgaaagaaaagggcgaagatttaccccaaaaatagcaaaagaagagaaataaaaatggggtcttcagccagaaagaaaagaaagaaacgaggaacttgggttatatcaatggtcacaaagctcctctcctgactctattacaagggcatagaagcaaaagcaccgcggacgcccatagtactatattcggccagctactgggtatattccttcattgtccttgcaaaggcgatcgacataagcttccaccttccaaattagcctgtatcaggcatggatactcaccgcaatacacactaatcctatgatccttgtacgtagggatggctctgactcgtaccaactagctccgaacgcagccgggtcttggcgagacattgatactttggcttgtgggaccggccagccaatcaacttattctagatcctgcgcactcgtgctagcctcttagtgtcttctctgtgccgtttgacatgccgatcatacagctctctgaaaagccaccaatctaacggtgaagctagtcttctttgggttccaggttctttgttcgttataatgatacagttactgttttaggagcgtatggaatacatctcagacatccgaaacctaaagccccctattgttgtgtatgactggggatgtagcgattcttcctatctttctgtctgattttatgtaaggtacacttggaggaaaagaaaatatgatatgatcttatgaataatttgagctttatcatacgtttattgagtatgctgaataaaaatctaaaatattatattaaagagggatatggtcgttttggtaggatccaacaaccaaataaccgcgaataagtaaacacagagaaagaaacgaaagaaatagaagccattgccctacataagaagataccctatcttcaccctcaactacactggttgtggatggtgtagtcgggcttcatcagaaaggtccaagtcatcaaactggtagaatgggccatcactactcttgttctggacagggccagaagtcccacgagaacgcgagttcatagcgtatgatgatgatttggcttgctcggtatctccaaaaaatcggggagatatacgacgtagtagagatcgaatagcgggcagacacgcacatataacgccaacgtcacattcaatagtactccaataccctatagccacgtaatccccttcgaaatgtcaatgaagctgcaaatatagaaagagaaaagagagggaatgaacactcacatgtaaggttagtggtagaggcaaagtgaatgagtgaattcagccgcaggatgctgacaagggtgacactaagctcatgagttagtcattgaaattttggaacaggctgaatagggaaacgcacaatatgcccaggctgaacatgcaaattacgaatgatttccgtttcatggaaaggttcaaaccgtatagctgtcgtagagggagtgccatgacaattatatcgagaaccatgttaagcactgccgatgaccagccctgtgcgttgatgtggttgcatttgtagttctcctctccataccagcgatgccacgctccgggtagaggccgacactggaataccgatatcaagacaaaggcgatccaataggagacgtttagtgcaatcaccacgtacgttgctgtccgaaacctccgatcggggaaaatacgaagatagaaaaaacagattgatattttggtcagcgggagaatgctcagatacaacaattcatcccaaaagtagacctggcgcaattagacaacgtaccttgggaagagcaggaaacaagaactttagggtactcacgtaaagaatatgagtgatattgtcgaaaggaagggtccacatatccttccctaaacctgtatcggccactatacaaatggttagtggagtgaaggggctttgactagctgccaaggaaaccatacagacgaccgagagtgctgaaagtggtatgagaaaggcctgtcaatttcagtgagaagagaattcggtttcgagcaaagggaaaggtggtatataccattgtcaacaccattgtccaatcatccgctccaaaaatgccaccacagcatctaaatcgagccactatccggagaataaaagcgcaaagggctataattccgcctgcaacccctgcataagatacagtctttgtgtgatcccgaattgggtccccgcatgctgatgtcgtgacattttttgtagcttgtgtatattagcaggggatggaataactagtcataaaaccattgactcacttagagattctcgaattgtacaattggcaagaacacactcctgcagaacggccgtgtagtgtacatcattgcacaggcatgtctggtcggttgtcttgcaggaagattgcgacaccgaagtcatcatacagtccagctaagaagggtcagtgatatcgagttcgcgctaaataacggcagaagaattgcacgacctaccgcacatgagggtaaaacggccgccaactgttccattcctgctatcacagtcgttgcgaacagggcggccacaaggactgctgttttgaaaaaacgcatcgtgaagcttacaggataggattcattcgttttgcgattaagagactgtcaaaggagacctgcgctgaatttgatcagtcgagtcaggagaatctacggagtaatattatgagattcacgacgatctcttagctgggatacaagaatttgttctaccttcctgtcaggatcgctagcgcatgaaaatctcaagtttaaatgccgcatcagtcctcactggggatttgcctttctacatgtttagatgtttaggtaccacatctgtcattgacgttatttggggactgtttcaagcccctgccagttatcacattgtcacctagcaacaatccacaacttcaggagttcctgaaccacatcacaaaagtacaagtaattctatacagacggagtacgaagtacaaccggcaacttcggacccttagggccagtcaagaagttgactaagctggtctctcataactaattgactaaatggttatggatgatggctgatttaaattaagatcggcacatatacgagccttccccagctcttgggccaactctagacgtttggaggggcccactaatgccggaattgatggtccgtccagagaccgccgatctaaattgggactttgacactccccactcactcggagtaggttatccatttctatgccgtatacctagttgagcctagtgttctccagagagatccacaggctccggaataatggctaaattttgctcagactcccgtggagatgatccgaagaatctccgtagtgggtctatactatcgggagaaagagcgcttcgatatttacgatctacacgcatcaatgatccttagacatatcttacaaccccaatgccgcgatcagcactatcgttgaacaaagatgtttcaccctggaggcgtctgctaagatttaaattcaccgcgaggcgtgcgccaagatccatatatccaccacaggagcgttcgaatattcccaaattaggcccgatcgacaataacacacgaatagtacggagtatatgtatccataatccaccctgtgtagtcgaagggatggtcatggaaaaatcaggggcttgtgtcgtacttttcgtggctttttactccgtgcaggggtgctgaaagggatctaccagaacagaatccttcaatagagaaagagccggaggattgaaactgattgccggttaatttacgatatacacaatatattatttgcaataccactaccatacgcctggacagttgtctctatgttgtactccttcgggccataattgcatatattctatagtggactcatacgctaagacgggccattcaggggatcatcatttctcagcatgtgcgatcttcgaatatttacctaggcatagaattgacgcgggatatctaaggaatgcattattccactcctctggacagtcttcttcagtcactcgttgcacgatcattcctttgaacctaaggggaaactggcatttctagtggaggactaacacattagttcatcatgcgcattctcactgcagggttttttctttgccaattgtcactttctacactagtatcggctttctcggggtcaatgagcaaccacaatggtcattcgagacatcaaggcatgcacaagtcttgcccatatgccaatgccaaggaccaggctgaaccgaagacggaacatgagaagcggtttctcttcagtttgatgaaatcgcctatcgatagtatgccaccaaagccctctcgcttgtcacaatttgtaacaaaacaatagttaccggagaacatgcgttccaacccccagacttcgagaatggtgaccagcgaggcccctgtccaggtctcaatgcactagcaaatcatggatatatcccaaggagtggagtggtgtcggtaggttattcctatatgactatcatcaactcctagctaaatccagaaaaagttcataaatgtgatcgcagcaatcaacaaaggtatgattgcatcatgaaattctcaacacagcatattctaacctttcttcatcagtgtatggcatgggtgtcgacttggccaccgtccttgcgatcatgggcaccgtctggactggagacgtgctgtccctcgatcccagcttctccatcgggggtcccgatactggcgttaacaaccttctcaacaacttgggtggcatcctgggttagagcaccttacttgcttgctcatatctatcaccgctgacatcacctgcagggaagccgcaaggcctcattggctcgcacaattttatcgaagcagactcctccaacacgcgtgatgatctctacgttacaggcaacagctggacactgaacatggacaagttcatgacttggtataatatgtcttccgacggcacttataatatggatctcatggctgaacgcgcaaagatccgtatggatcagactatccatacaaacccggatttctactacggacccgtgactgggctcattgcgcgcaacgccggttacatctttgcaggtcgactgttccgaaatcactcgagtgaaaacccagagggaacactgagtaagctgatataagaggactgattatgcgagatctactaactccatcctagctaagagccaccttcgaaatttctacggcatctatggcccggaacacaatttaacctaccgcgaaggatgggaaagaattccggaaaattggtacaagactcctatagactatggactagtctcactcaacgtggatgtcataggcttcatattgaaatatccggagcttggaaggtaagacactctgccaggttcctcatattgataatcttctaacaataatttgaatacagcattggcggaaatctgggtgaagtagacagctttgccggagttgatctcggggatttgacaggtggtgtattgaacctggctagcctgctgaagggtaacaacttactgtgcttcgtggctgaggtgctgaagttcgccagccccaacgctcttagtggcatatactccaccgtagccaagccgttggagtttgtcactaatatcctcgctgtgcctttgctcaaccttacttgtccagcattccaagatcttcagctgggagggaagccgctatgggaggcgctccaagatgactttcccggtgctttaaagagcaaccgttcgctttaggtattgcgggcttgctttggattggatgtattataagtttttattccagtttaatactttattaataaaattctaattgttcctgtgaaaacctgaaaatgggtatatatagttacggggtgctgttctaagacagggatcaacacatgcattaaggggaatatacggggattgagaattcggaaacatgcaaggttatgcaggtcaccatcaaatgccaacctgcatattatatagttctgtttgcattttgctgcatatagttcgggcttacagctgatcgaatgttagaatgggaccgctaatttagtgtgaaggaaaatatattaatccgtgttaatccgcgtttcgaccatctatctgctcagaggggtcttagcgaatgtcgagatctctctttatactaggatgtcttcatagcttataatagacgttcataaagaccccatgatcattatttacagtattatctttaccactaaatcctatcttcttctgtactagggtattataacccctaaaagaatcccgacattcgctgatgtctgacattcgccgagctctcggaattcggattaatacatgttcctctgggccaagaggcgctaaaaattagcggtcccattctaacattcgaccagctgtcggtcgcaagggactgatatctgacattcgccgagctctcggaattcggattaatacatgttcctctgggccaagaggcgctaaaaattagcggtcccattctaacattcgaccagctgtcggtcgtatagttctgtagcgctcttgttttgcgttgtctgaattagtaaaacggcgcaatgcgtgatgataacagaattgtcagcttatcagcaatgcggctcagtggtttagtgggataattcatctttcgggagaaatctctggtttcaaaattacctaatatagatgaggtcccgggttcgattcccggctgagcccctttttttattttattttagaattccataccccttgaaccatacatttctgagggttaaagttattgatacccatgcatattcaaggagagcccaccaaccttagaagaccatgcataccacttacataacgtgtattttaaggttctggggtcgcgtagggcggaagccaattcgatatcccaactgcactggcctcggcatctctttccctgtaacagcattgcaaggaattttggcttcttcgattgagttcccttgagattctggaaactctctctgatcagacccctcagaatcaaacaaagaactctcatctgctaggcccgattaaactgaactagcgcatcgtgtgctagatctagttaggcggtccggccaacgacagaccaacgacaaaccgagctcatgcaactaagcgatagtttagagccatcgtacgtgtccctggacgaaagtgaaagtcccgactgagcggtgagaatcatctactcatgaatggtcggggatgatgaatgacagggattgtttagtgtcggggcagtgtacaaaatacggactaatatgcggagcttgttgcgccctgcgcttcgcttgcgatattggggctgtctctcttcatctgtccgcatgggattctgcctatagatatgagtttaattaacttgagtttgaccatgccagattagttcctcgaaagtacgggggccagagtgtaacccaagacattcctggaccttaaatgggatatcagtaatgcccattctttcaattggaagtttaagattagacatatatatatgatgcatttccctgatgtttggatctgccctatgcatactattcagtcaacttgttgatttctcttcatcatgcgctcgctgtgggcattatcggcactggctttctcagttaaagccatacaaacaacaggatgtcctattttgggaccggcattccctgcccctaccgctctttcagaggatcctactttccttagcaaagctgaggaattgacctcaaagctcaatgatgccattaaaaatggaagtctgcccgccatatccttcgcagtgcaggtctttagcagcgaagaggacgacgcaccattcgatttctaccacacagatgatccagttaaagttggatctgtgggcgttcaagaggtcgacgaggataccatgttccgcattggcagcatatcaaagctgtggactatgtttctcttcatgaccctggaaggaacacagtacttccacgagcccgtttcgaaatacgttcctgagctgcgaacaaactacagtgcagcacaggccaaagatacaattaattatttgcaatggagcgatgtgacgatcggcgagctggctagtcaccaagcgggccttgcaagagactgtatgatcataacccggcgacgcgagtgtgcactgtgaaaaagaaactcacctttgattttagatgcatttggagacctcgaatttgagtcagagcttctgcagggcatggggttccctgcgctcctaaaaaatgatcaactgacttgtgggagcacgtctacgtgtgataggaagggtaagtcaattgtgtgcactcataatatggtcgaattgtttggctgacagcgggaatgttttcaagaattcttccgtggcattctacaaacgcgtgagtaggcatgatgccgctgaacttggacatacccctaacatggtctattagatcccttgactgcaacatcacagaccccgatatactcaaacgcaggatatcaaattctaggctacgtgttggagtcaatcgcaaaagccgactttgaagatatattactggaccgtcttatcaagccactcaacttgactcggtcttgtcttcaaatcccagaccccagcttggcagtgattccctacaatgagactttcagttggtttgggtatcagattggtgaagaagctccgtgagtgctaatcagccatttgaagtatacatagcttacacattgctagtgccggaggcatgttctcttctgcaaaggatatggctacatttggccgtgccattctttccaacacccttgttgaccctgccgtgacaagaaggtggctgaggccgatggctcacacatcatccctgcaactgtccgtgggcgccccctgggaaatctatacatttttgacacctcgtcgggtcgacctgtataccaaggctggggacatcggactgtactccagttcgatcggtctttcaccggatcacaatgccggtttcacggttctagtagccggagctaactctcacgcgatgacagcacaaatcggagaaatggttgccgatattatgcttcccgcgcttgatgaagtcgctagaaaccaagcctttgaacgctttggcggtacatatgccttgacgagcgactccttcaattcctcaatcaccgtcatggctgatgacgggccgggtctggtggtctcagcatggattagcaactcggtggacatgatcgaatctttgatgaccttgcaaggggtaactgatcgctctgcgataggcattcgtctacagcctagtggtcttgagaccccagggcggatctccttcctggctgttatttatgcacttcctatctcggaagatgctgggccttttattggctcttgcttttcgtggattttgcttgagtcaatggtgtatggcaacgtgggccttccagagtttgaattcactctggatcatgatggagatgcgacgagcttatccccccgggcgttgcgcgttacactccctagagtttaatagatgagagtttatcacaatgtatctaagttggcggttgtttaatttcttattgtatagagttactctacgtaacagctttgaaatgtcgattggtcatgtccggacttttaaacaccgtcagtccaatctgggaacattgttatgaataccatcattatttatttttcagtctcgcaagagccataatttttgtctccctttgtcgagagcgcaatgcgtctgacgctaaccagggggctctcctcgaccgctcaggccacatcttctttctcctcacccccttctcccgacgaactacctctccctttccacatgaaaagcacactatattggtcttaatcatctgtatggtgctcgtttcgtacggagtccttcacagaggcttcacttgaaatatatccagcctcgtttccagccgcttcggcactttcttcgatgcgaccatatgatgatcaagaacggtcgcaatctgtgatgaaagtcgggttccttcagtggccctacctcatatcgcaagtaaggtcgacggtcggtcatgcgaagatgttacacccattacatttcgacaagcgcccgatcgcccagataatcacaagctattgatcattggaattttgccgaagtatatcttttggacgatgatgttatcataaaatccttcgcagccagagtgaagaagatatgcaacctataatccgcgaagctataagttatgacattctcggaacccatccacggattgcggtatggctatcacgatcggaatatatcgacatcagtactatctacatggcgacgttgcaaaatattgccaggagagctcgatcacttccgagcttcgatctaaatggttccagcaaatcttggaagcagttgttgttattcacagccatagtgtgttattcattcggatcttgccctacggcagtttttcattgatgataattcggatctacgactcggtgatttcaactcttcacaatgccctggtcatatatcaccacactgcttgccacaagactatgaacttcctaatactgaaacgtccgatatctttgccctagaatctaccctctacgagcaagttgctggtaaggccccatatagcgaactctctcggcctaaatccgatgatctggatattatcaaaagctcaaatctgaagacaacatatggtagatcgtgaaattgaatatagttcaaaaaccgcaattttcctgatgtgtctgatctattcggaggagaaatcatactaggttgttagagaggcgaaattcccactgctcaagtggcatttgatttgtacttgaaagatttcgtttaattcatatctgaatacaaaggtaggggagcgcgaatgtccattcaaaccactccattcaatcaaacccaacaaacccatcaaaccaattaaaccaatcaaatcatcaaacccaaacaaagcaaataactaaagcaaacaaacaagttgtacactccacgacccacttgtctcagaaactccaacttctgacgatacatggggtcactccaggtagatatcactagcctctgatttgaatattgagattcagaatagaaaaagttgatatttcatttggacgactttgattcagacagaagaaagaagaaaatgaccaagaaaatcacgacgttaagagattcagcttccatgacttgtaggacccatctagatgaacatgggatgatagtagcctagttccttcagcgttatagtaggcaacagtgacgatcttttcctatcatcgaactcgggcttgataatgaattcgtgactgttgtcgtcgtgagaagatgtgaaatatcccatgatgatcttgtctataagatctggtcagagcggaacttttgcgagaataatccgatctgatttaccaaatgacatgtccgtttcctttaatcgtgcattatccacgcaaccatctgtgcagcctcttgccacgtcgctcattgtagacgtgcttattcaaccccacacttttggggacggggtcagactggtagggccaatgttgaataatatgagcgtatgatgtatctgtggcatctggttggaggcctaagtggagggccgacagaattccggaatcttcagttgagactgtgtcataaggaacatagcactgactttacaattagtaatgtgctttgttctatgctttgttctattgtcgatattactggcggactgttaaatcccacacagagaagctcttcaattattttggacgctgaatgaaccaagctcgcttaagttggtacccaaaagtcccaaatctcgcgatcgtgccactcactaacggcacgagaggatagaggtggccattgcaaaaagaagccccaagtatttcttgggacttggatgatatttgtgggagttgagaaggttgaagaaagaagaaaagtgaggagatacagagatgaggtaaggtcgctccttcctcaaaactgttgaggaagtcactagtcacccggacatccataacgatataaaggaaggaaacaacaacatatgtacagaacatcaacagcacaaaatttagagtttaatcataatacttagcaaccacacccccaatgataggctgatctccgatttcactccgagccacacctttgtcaacccccttggccactctcgccttcacccactcgccagcagtgataccaaccgcactattatcggttgtctggtcatatcccagacgatgcagcacgtcactcacaaccggtcgcagctcgaggctatcctccggtcgaacaaagtacaaaacacctagacgatctacatccctctgatcgggcggcggtgcaacaacacggtgtatgctgctcttgaggaagccgttggtgaggaagtggagagagtccgcaagattcaccgtgatgctcccggggtacggcttcacccacttccactcgccctctggggtgcgaacctgcagcgcagcaacgggttggcggaacaacagagtcaagctgccgaagtcggtatggcccttggaccaaatcccggcggccttctcgttttcttcgtctggacgccggtggtacttcatgtaccttaggtggcagtcgcttttttcaccatagcgatgcacttttaggaaatagtcctcgggtagctcgaggataatggcgaagagcacgagaagtttggccgcgatttggtcatgaatgtggcgtgcgaagccttcgataataggacgattgttgttcacaatgtccggttggggaagctcgagggctgggatgaattttgggatgttgtagatttctgtcttgtcatagacacccggactaatttcctaacctagggttagatatgattgtttctcgccgtagattatcggcattcgacttacccggagacccattggcttgtagccattgtagccacctttctcaagctccgcacgatacttgagtttctcctctattgagagattgaatatctccttgccaatagcaaattggcggtcaacatcttcctgcgagagcccgaagttggtaatataaaagaagcctaatgccagataagtatacaatcatgggaagctggtgttggaaacatatactactgacctatattctggatagcctcaaaaagttgcttggctaactgctctttaccgccgggttggtcgaacacagacagatccaaggtagcgagatccgcccagtccactatatgcaagttacacgttagcatggtgtctcaaatctcggctaggaccctaggttttgcattaaaccacttacgatcaaaagtagtctccgggacctgactgtatgttgggatatcagaccccgtaggaacaggggctggaggttgggtcaaagttgccatggttcatgcaagatagtggaagaaaatatataaaaagaatatatcacagcaagctggagtagaaggatttggttatggagacaatagcgtgcatttgcactatatctgacagatggggggtttatcaagatcgcgatatccttggttttgtagcggatttgtagttgacccttgagcttattgttgaatccattccaatcgggcaatttgtaggtttattccattgacagcccgcaaggttgatatgcaaggccggccagattggtgcgagtgcaggtggacctctttacgccacgtgggctttagatctcatcatgatatcctccgtttgcgtgatcagcgactgttccctcactaaatcgcgacttacgcacttctacaatatttccaatgataactccaaataagggaatgaatgactttgaccgggaacgtacttatgaggatattaactacacgattttactaaattcgatatataattattgacgaaagtaaagagattgattccaaaaatattcgaatagactatctccatctggatttgaatccaattgagactatattgtatgtcaggacttgacagcagcaagtatggcctaggccatagcatttgcaatacttttcgactatgatacaattttttatctgctaggtttggagcttggtctaagcttctataatgtttttcggagggtttccggactgataaaggagatgcatggcgatctatcaatgacaactcgcgtttaaccgggactgtcaacagtaataatttgagaattatactgtcgaaagcaacatcgctacaatggcagacaaagaagacgggcgcatttcatccaaagatttgggcaggaccacggccaccgatattatctccaccagtgataccgataccaatcatgcgcttcattttgcgagacgtggtgaagctcttgaagaagcctcatcaagcctggaaaccatcaatggctacgatccggagcttatgaatggtaggacactgctcacggcagcagaggaaaagaagctactacgcaagatcgactggcggttaatgacgctttgttcactcatttttatgtttaagaatctggacagcaacaatgtgcgtatacacaaggatactaggtgggacattataactgacagcctcgcaggcatccaatgctcgaatcatgaacaagggaacggatcagaatatcatgacacagctcggaatcacatctaacgagtacaatcttgtgactgtgctttactatgtaagatatccagcgagtcttgatccagatgccgtggcgtatcgctaatcatatgtgacaggtcccatacattttgttagaagcaccctcaaatttactgctcaagagatgctccccttcaaaatggcaatcaaggattatgatcagctggggtatcgctctcatgtgcaatgctgctgtgaagaataagggcggtttatatacgacacggttcctactgggtgtagtacgttaccgcgccaatatgtctcatgattccaaaatggaatagactaacaccgcaataggccgaggctggacagttccccggcgtcattctccagatgacttactggtatcgcccggacgagatgtccttacgactgctctacttctgtaagctacacacgatccgctcgcaaaacatctcgtactacatgaaatttttaactgacgatataaagatatctgcggaaatatctcgggtatcttcggtggtcttcttgcctatgggtttgacaacgcatctggtgcaggcggcctttccgggtggcaatggtagcgttctcttatatccattcctgaatccgtactaaaattactctaggttgttcctctcagaaggcattgcgaccgttctttttggatttgtgatttggttcctactcccagactgtaagggtcatcctttgctcataacacgacgccagtgactgatatgcgaaaacgcgagatagttcccgagacagccaaatggttgactgagaaggagaagaagtttatccaggctcgactcccatctaattcgccccgtggaaatgagcagcacttcaagctgcgtgaagttatcgagtcactgaaagatcggaggctgtggctgtttacggccatttgggctacctttactgttggaaccaacggtgtcacattctatcaatcgacggttattgccaacctcggatacacgtaagttggttactttccgcatacagttatgacttcaacgggcattgctaacagtctcttaggagcattgcccaagcccagcttctcaatatccccatcacgatctgtggtctcctagtcattgcggctacaggaattacagcagaccgtagccggataccccggccattatacccacttaccttccttgttatcatcatagtctgctacggggtctttgttgcctatccgagtaatgctgctatatacgcggtaacgttgatcggaaatgccgtgactgcatcatggtacccagtcatgtggtaagtttcctatgtcctcatccacttcatatgtttgtatagctcacaacgtgataataggccatggcgcgtacaaaccacctctcgagctacgggatccgccttctctatcggatttgtcaacagctacggtcaaattggcggcgccattggtccgcagttgtttcaaagcaagtttggacctcactacacagtgccattctccgtcgctatcggtcttgtgggtacttgcgcgatcttgacggtggtaacgtggtgggtgacacaggagacggagcgtgacacgaggcggctgaagctagctaaaatcgcagcggaaaaaaggggcgagacgattttggaagatgttgtggacaatgacttgaagaacaattgagggaagagctgttgacaagcctagatatattgcggaaacctatatacaagctgtagattatagaccaaagcccaactccatcgttaacaaaaattcagtgaataatatccgtgacgtgatgatcttcagaaaaaatgatgttcttttactttgtatgatgttaattaccccgatatccaattactccaagttccaaaaaaggtccgagaatcgaatcaaaatcgcgcgatctccccgcggctaataaaaaccctccgactccatacatacccctcacaatttgtgggaacctcttcatgtggtcttctacatgattattccttattcgcagacaggtttctgacacagcatccttggtattcggctcatctagcttggacaatgaactcagttgacacccaatcgcccgcaagggctacgagtgacccctactttgacctgggaacattgagccgcaaagtcagcaccaattcccaggaagcccagatatggttcaacagggcccttgtctggacatattgctttaatcatgatgaagcaatcacctgttacaagcaggcaatcgcgcacgacgaaaattgcgccatggcctactggggggtatccttctgctcggggtccaattacaacaaaacatgggcgctgttcgaccaaagagatcgactcaatgcaatcaaacagtgttatatatattctcaagaagcactgaggcgggcaaacaatgcatcagattgggagcaggcgctcatcaaggctcttgcagaacggtaccccaacgacgatccaagtagggatcttgcaggatgtagccgagcgtatgccgatgccatgagagaggtatatataagtttcggtcgcgaagactttgacattatcacactattcgcggacgcattgatgaattgcgcaccgcggaagttatacgacgcctccacggggctgccgatagcgtcttctccggtattcgaagtgaaagatctacttgatcgggcgttgaagatgccgaaagttgaacttcatcccggtcccgcgcacatgtatatccacctgatggaaatgtcggcgactcctgaggctgctctgccggcagcagagatgatccgtgaaatatttcccgatacaggccataccttccatatgcccgcgcatattgatgttctcgtgggcgattatcgccgtgctgtggaatacaatctgaaagcgaccgtcgcagatgacaaattctttgaacagaatggcggcttgacattctacagctattatcgcttacacgactatcactccctcatctacgctgcgatgcttggtgggaaatcaaaggcggcattgtcagcgacggagcgaatggaggcgactatcacagaagaaattctgcgcgtcgagacgcctgcgcttgcaaactggatggaatttttcaaggccgtcagagtccatgtgctcattcgctttgggatgtgggaagaactcaagaagctcgacccgctcgaagataagaatctctattgtgtgacgaatgtgatgagacactatggaaaggccatcgcgtatgcggccacgtcgcagctcgaggaagccgaccaagagcgagagcttttcaaagccgcttcgaagcttgttccccccacacgcctcgacttccccaacaaaatcaccgacattctcaaaatcgcagctgctatgctggatggcgagatcgagtatagaagaggcgattatgatgaagcattccgcagattacgggaggcaatcactctggaagacgagctgcctttcgcagagccatgggggtggatgcttccagctcggcatccatatgcagccctgtcattggaacagggcagagttgagcaggctgcacaggcttatgctgaagatttggggcttttcccgacacccaaacgcacccaccaacacccgaataatgtttgggctttgcatggatatcatgagtgccttcagcttttggatcgccatgcggaggccaatattatcaagaaacaactttcccttgctcttgtggaggcagatgttgaaattacatcttcatgcttttgccggcttgggaaattgccctcaccttgtggaaagcttaaaatgaatggttgccacagtgtggggtcgacgtgtaataagagctagatgaacattttgcataaattaacattgttccgctggcttctcgtttatgatacatatagaaagatgtaaaatgtaaaatctacgcgcccaccaaagtaggcaacaaatttatcatgccaggtctttcgggaacaccttaaaagaatacgctataaacacgggtatcacaccacggcatctgcaacttgcttgatcatcccgcgaacctcatcaacgatacggaaacaaggcaccaacttccgcgctatcggatcatgtggacagagatcgagcgggtcgtgatcaacagcatcctcctttctccgacaacggccttcagaattggggcaattttcgtgcccgaccatatggcgattgcgttgccgctgcgcaaactgttcaccgaacaccaaaagccggtctgtatctgtctggaggccgtgcacgacaaggtcccggagcttctcgccgctgatttgtagattcaactctgacggtattccaagcccacagtcaagatagacggtcctagtctcgttgctgatatctagctcagtgcagtgcttatgcagccagcggatgtacctttggtagccggatgttatttcaaacatgagctggccgatgaggagcacattttgaaccgttactcgaggcggtttggacacatcgtagcacataggacaggtcagtagtctctctgtgagggacacgcctgcgcggagcatcggaacgatatcgtgtgacatattcgcgcggctcaagctccggattatatcggaaacctcttcgtcgcatttacaagactgagagaacgacatgggagagacgtatgcatccaaggctcttgagggtacctccgggttatgcaatccgctctggcgtgatgtgtgcaatagctcaatgggaaaggaacacatatcgccgttcccgagcatctcccagtgcgaggaatcgaatccgcagctaccggatagctcgtatggtaatgagtcgaactcaccggctcccattaacatattgccggcttcatgagagtcaaagggcgattgagaaatgacaggcgagaaatgcgaggagcttgaagatcctattcgctcctcttcgttcggtaaatcgcggtctggttcctcttgtcgtgcgcgctttctcggccttccaggggctcctttgtctttgaatttacatgtcaatgttaagccccggcaacgagagcaaccactcttttcgcctgagcatctgagcttccgtgcccctatttaacattagccagacattcaaggagtggagaacggctcagctcacggcatgcttcgcaggaatttcgttgtcgagtgggatacatactatgttgaatgtattagtttgatctaacaagcacaggaccgaggtcggaagttgacgtccaggtggaattggaggattggtcatcctgcgctgagatggcgtcaaccgagcttcgagcggggtagtgcagcctctgagcagcagattctatgcatcatgccgagtcagtgattgggatgaaaggtgtcaatagaagacatcaaaagctcaagtattgcgtgtgcttctgaatatcaatgttcggagctgtggtttgcgggtttgtcgaaaatcctccgagaaaaaactgccgagcttctgtgtagcgtcgcttcgctgtaatttccatttatttcctttcaattcaatcggtaaattttcattctggttgaacagcaaaatggccaaatccataaccgcacgcgaattgcgtcagcattgggtaaatcaccatgaagttgccctcctcgacgtccgcgaagaaggcccctattccgagtcccatcctctattcgcactaagtgtgccagtttcggagatcgagaagaagttgcctccactggttcctagattgtcagccccgattgtggtctacgacgacggtgaaggttatgcagctcgggctactgtccggatattagcgctgggatatcgagatgttgccatcctgcaaggcgggctttccggctacgccctcgttggtgaggtctatcgcgatgtcaatgttccatccaaggcttttggcgagcttgtcgaatcgatcaaccacactccatccttatctgcgcgggatatcaaggatgttctggagagtgagactgatgtggttgtcttggatgcccggcgttttgaggagtataaaacaatgagcattccccggggccgcagctgtccagggggagaacttctatatcgctttttcgaagctgtaccctctccggaaaccacagtggtcgtcaattgtgcaggtcgaacgcggagtattgttgggacccaatctttggtgaattctggaattccgaataaagtggtagcgctccggaatgggacgatcgggtggacattggagggtttggaactagagactaaacagacggaacgggtcccaggtccttcagttgaggcattacaaaaagcgcgggaatacgctgaatcgtgggcgaatcacgtcggcgtctctattattaatggcgatcagctcactcgatttagtacggagtcggaaaatcgaagtctgtatctgctagatgtgagagacccggaagagtatgcccttggacacccgaccggcttctccaatgctccgggtggtcaattggtacaagccaccgacgaatgggtaggtgttaggggagctcgcattgttctgtacgatacggatggtgtacgagggcgcatgacagccagctggctcttgcaactcggatgggaggtgtatgtctttgaagagcgattggcggtgcctgataggcttgtgttgcctgaagtctcttcgtggaatcctccaaaggatggcgctatcacggtgaacgaccttcagaacctcgagggagcgactgtggtcgatctcgcccgcagtccgtcttatcgcaaaggccacattccgggcgcatggttcgcttctggaccggaacttgcgcgagatctgagggctatcgacggtgacggccctatcgtgctgacctcgcccgatggtgacgttgccgccacgaacgttgacgacgcacgcaactcagtctcacgacaagttctgtatctgacgggagggacaacggcctgggtggctgctggtcaccccctcgagaccgaattgcgatgtttgtcgcagccaatcgacgtgtataaaagaccgtatgaagggacaagtaacgctcgcaaggatatgcaaggatatctcgactgggagtatgggcttgtcgcgcaactggccaacgatggggtggcgtgtttccacgttgtgcgggactcgcgtgagaagctgcactgatcggaagtgtgtaactctcacctagctacaccttcttgaagcaaaggaattaaacataaaaagtaagaataaacctacatttgcgaaggcctgattttgctgggtttatgccttaatatgccttaattatagaccgctttcgacaccgctctagaccgtgtaggtagtgtaaattgaagctattcccgccctagcgtcaggaaccgtccccgaccgcataaaccactgaattaaagctattttcaccccacaaaccatttgcacggtcgtaacagcttctatacctataaataggtgcatacggagattggtataaattcttcagagagatttgtccgttcgcaacagcttcaacgcctagaaatgggatatgcggagatttgtatgacgggaatagcttcattctttttacaaagttagttccaaggttcgatactttgcttattaagccctctgtatttttatttctgccagtctactccgtaaaacacctatgctcggctctccataccaagagatagggcagggtctctttcgtctaatgaaacttgcgaatactatacgtatcggaccagtagtggagccatcacaacgccttttatgagctaaggtaagacattaatttcccaagcactctcggacctctcgtaccctaaagacgattgcttgttgatatgtgtatgcactttgaagctttttcctgacccacataccggaaggttatcccaaaattcccttaatcggaattccccactgaacccaaaagtaagcacattatttctctataagtcatatgctctcacttctggtttatcacttccttcttgcgtagttagtgcctacattagtaactaagacagcattcgggtgaataggctgaagggggctgaagactcttgccaccgagcctgccctggccccctgactatcctcacggataaagagagagcgcctatgaaggctatcaagcaggttagtattataatcctaaccctttatctattatctactagtaaactattatctataggtcttcccagataccatcaatatgctttccctctggcaaattgcgaataatattgagaggcatgcaaaaccggctatccacaacttcgttcaccgtacaatgaatctatggggttgagcttcctcaactacaatttttggcttggaagtgctagacaatcgactggtcgcatgtgcagcaaagaggcagatgcagcgtttttccctggaattgaagtattgcgatgaaatcgcggcgtatctaggcatgtgcctacggattccaatttctcgcccccgcaaatatcttcccacagagagttaatcgctctccttgaagtaaggggagtccacttcacattccgtatatgcatgaggcaatttgccttcgtacaggaaatcgcgtataatatttgcagcacatgaggaatccaccgcgatagagcaatggccataagctttgacttcgacgatttgtgaatcttgaaatgcctccttcgccgagcgggcagatgtaagaggagttacaggatcccaagtagttgatagaatcagcagcggatgcgccgttgtaactcccttgcgtggtacgtaagagtgtgtcctcggcatagtccactgctgtctcatgaagaatattttgctgtgtctagcgccgaacatactctgattgaacgaagtcaagatataatcaagtagcggttgcctgtcttggggccaatttttgggaccactcaggccatcgttcaatctgataaactcgcttgcctcatggcccatatcccaagaatcttcacgcccatatgcaagaaaagcatttgtcgcatttccttgaatgagactgtacaagttgttggcaagtgtaccccacgtggagggatagtaaagggctggtaaaacaccatcataccagagctcttcataccctagtacaccatgtgctgtattgttcacgtacacaccaattggctgttctcggagcctattcatataagaaaggaccgtatcgcgcaattccacagatgttgcgagcgaggatagtgggcatttttttgtgcctgctctggtacactcttcaaaaaacccatcaagtaccttgtccgtgtcaacctgggactctatttcaaaagtaccgtcgtaccatttgaattggttcacgacaccgtcgatgatgacacgtttcgaacgctcggggaacagtcccgcgtaggtctgccccagaaggctgccgtaactgaaaccccaataaaccatgtctctctggccaagtgcatccagaatatcattcatatcagccgctgtctggggagtgtttaaatacttggcgtgttctcccatcgtatcgtggcatgccttgacaaagttctgtgtccatgcatagacttcagggctgtcaatctcgacattgcgagatctgacatgagctaaatcctttcgagatttgacatcgggatagcaggaggctagcggcgtcgagctattaacaccgcgaggatcgaacgagactaggtggagcccttcgccaactatagccctcagctgctctgcattctggttgaggaattcgaaaccactcgctccagggccacctggattgagaatgaggttctgggttgcgttcgtgccgcgcatgcggatgagtggaatggtgaagattttatttcccgagttgctctggttgaattgatccatggggacaaaaacattgccgcactccacgaagttccccttgatgaatccacaaggctcccaacttatctgttcaccagtgtatttgagggtcctatgctggtgccatgttggtatttctaccgaccagtgtttgagagcaaacgaagaacagatcaaaatcaccgagacgatggcccaatatttcgggcgagaagcctgtaattgctgttttctggcgaaatctcccagcagaagtgattttttcatggtagtgttttcgcttgcttcagctcaagtcccgtgggtcacgaatatgaagaatgtggctagacaaaagatgagtactcggagtagaaaggcgctttcattcgggtgttgttatgttatgttgttgcctacccgtgcggggattccacaaggcggaaaatggtagtgtgtattggcggcgaaaacgtattcaaaagatcttaccccgtacatgtatcgccgttgatccatgttgtatctttatttgagtttcactggtattgtattgttccgctagtagtgattgcatggtaggaaccgcattgtccaatatggcccatttcggctgccgtagatattagtctgtactatcgaagacgtaagatgcttacttcgtatctcaataaattctctaacttgtcccacagctgtagtctataattctcagctgctttatgttcccctccaatatctaaactgacacatacgaccatagggtgtggaaaatagggcttcccgtccgctcagccgtactcaagccacacgccggtgagttagtagttgggtgggtgaccaccagcgaatcctcactgttgtatgtttttttttttttactcggtgtgaatgaaatatagtaataacatatgtatttgtggaactctataataactttttagaaattaagcttaacgagacataagcatttgacatatctatctgacgctatgaccatctagagagagaggtcacctgacccaatgatgacgatgagacataagctctaaaatgacaatcttgtggacaacttagtaaacaaaaacaaacaaaacaaaatgaaaggattttttttttcgccagaaaactgtgggactggtttttctgcagtaaaaccagcctggtaaatcacgtgatccatctgtatcaaggatgatgtcgaatttcgtacagcgtaatttaccactagaccataacaaaaactaaggttcttgtttagggcctagaggggccatatcccattcttgacagatgaaaaaatgacggtattcatcctagagtctgacatcaacttctcttcttgttgtacttctcttctcccttttctcaccacttcaagccgataacttcctttccccgttgtctcgttcctgagcaaagatccaaaattcctttctatccaagttcagaaaagcctcttctgttatttgtttgacttgcacaatctacaatgtcggacctgcgaagcttaagtccatccgtcacatcagaactctccacctccgaacttcaagtatccctgaatcatactttacagggctaccagcctttgagttcaacagacgacacacctttttttctccagattgttttcaagtacctgcccgcagacggacagcgtaacctgatcgaagacttatctggatgtcaagatgaccaggaggttagacaacttgccgagagcatagacacaggtcttctccgccctatgttgtctaccggtggtaaaacaccggcagtcactccctcatctcgtctcggtcttgaggactcgatcgaatacttgaacaccttcgatgtggaatccgtgacacgagttgaccagcagcgactccgccaggagtgcttagcccgcgatggctataaatgtgcgataacaggaacctgggatatggataccaccccacatccccccgggcggcctgtacacaagttgcaagcagttcacattcttcccttctgccttggaaattttcgcaccgacgacgagcgagttaaaatgtcggcagtatggactaatatctttcgatggtttccaaatttacggtcccgtcttaatatgttattaggtgatgttaatcgcgaagataacatcctaatggtggcttctgtttttcatgaagacttcggcatgttccatttcattcttgagccaacaacagtaccaaaccggtatcgattgaagaaattcccgagacgctcatgccttgtgaattatccgacggcaactttcatcacccttacaaacaatgataccgtttcagagatccaaacccagagtttttagctgtccatgcagctatcggtaatattctccatgctagtggccgtgctgaactgatcgagaagctcctacgagatttcgatggcgctgatcccttcctagcgaaagatggaagcaccgatatcagcagcctgctttccgtgagttgtctgtcgcttttgagttcccgcggcaatacaattcaaaatgacgaaatcaccaaggccaagcgaagacctgttcaagctgaactgcaaggaacggaaaatcagaagcccaggtcgaatgactcgggccatttgccacgatgagcgatacttatgtctttcttttacatgatctgccggttgcttgtcgttccctctacccccggcgctatatcactttctctttattttcaatctcatggctattagaagcatgtatcatggggatctccgatactggattaaacggctcatcccggagatctacggagtgcgtgggacgtactatgctattcatcattggtaccgacccggacaatgggatggtttgttgttgaaggccgccagtggtggggactcatcgcagccggagaagatgatcaaaatcgggaatctccatgtgctgaccttggtgggagatggggaatatctgcccaggcgtaaatcagtggacgttaactggattgttttgtagattcggatctttgttattgattgcacaatctgtctccgtatacgctctagaacagccatacggctataaggtgatacgtaaaccgtctctggcacggccgagaaaagaggaaggtcatctgtcacgaaatatcaacaagccccaaagatccaaaatagtatattaattttaaaatggtagatcttcttcaccgcccgaccactcaccaaacagcgcatctcaacacatcaccgttcacagctcaccacaagactcaccatgaaattcaccataacactcatatacctggttactctataccttaatagctgatatcgcaatcaatagcggcggaggaactctatcggatcacaaactaccaaggcagaaggaaggggaatacggcacccgataacaaagaaatttcattcatcaatactgcggtcttggtgattgaatttgcgagatctatctaaatcccattagatctttccaatgatgatgattcttcggactacaaaccagataacgaagatgttatgtaggtctttccttctccgattactcttggaatacttgaatactagtcaacgccacaaagaggcacctacacatcgctagaggccttattcttacagcatccccctgcgtagaatactcttaacgcgaatcttatcctgcaaagcagctttcacgtcgcggggctcaatgcagcgacagccgtgaccacaaaacctctcaaatcccgcagacaagcgagggacactatgatacatcagagtgtgaaaaccaaaatcttgaattaggctaaatgcatctatcatgctaaactacttagggtatgtctcccactagccgccattatcaaccagcggtagacatactggaagtagctatcggggagtgtgtcgccagatgaagaatatgtgtctcgtagcatttctcttttttgaatatttgaaaagctacagattgctggtgaagattgaagtaaagttaggcaaaatctcgtatctgttccaacgcatacagtttctcacttccagatacccctcaggccagttgctggaatcggtgagtgacgtcgaatatggaatatgcaggtgtcacctagtgctatgactaatcccgaagtttacccttaattccccacctaggaaaataaggtttacccttgactcccgaagattacccagaatcacaagacactgttcaagcaatgccatttgtggaaaatggaggactagagtcgtgttcgtattaatgagaactgtgctcttttaggtttgtacccgggaaatttgattcgatagttggccctgttccgattgagtctgggcctagggtaaaagcccattcccgcttcactcccacttttcctgcctgtggctaatcgctcttgaccgggcttagaacgatcttaagaccctccggccgtcattcttacctggcccaaccacttctcccttctcacctgactgaaaactcctggtggttattaccggcagcccctgcgaagagaagtgactgagtcttctcgtcgcctttcgtcgttttcaccttcataatgtctcaaatccaacaagaagtcaatgaaaacagccaaggggcaagtatccacattgcaaggctggagaccgaaccacatcgacgggaattcgccgccatctcaccaaatattgtttccaaaacacgccaaggggtcataatctttttcatcgttgcaagcaacatggtacaggtgaggcaatactcctcactgagtaaatcgacagactttgacagccgaccagatgatttccaacatggtgggacttgccgctggccttgaaattagtagggtgttgggtgcacctgttgggccggggaaagccaactgggctgccgcctcttatccgtgcgtaatgtgacactaccgctatagccccgttcgagacacttactactcctctagattgacacagggcacatttgtgctggtcagtggccgacttggctctgtgtatggtcaccgaaatgtgttggtcgccggctctatttggctagtcctatggtcgttggtgaatggtttctgcacgacgttcgtgtcattcaacgtggtacgtgctctttcgggtattggcggggctttgataatgcccaatgcggttgctttaattagctcaaccatcccacctggtcgatcgcgaaatataacgctcggattcttcggggcatctgcgccgattggaagctacctaggagctatctgggctggaatctttgttcaatggactagctggaaatggatcttctttggcctgtgaggtttttaagacttgacctccttcttcaagatactgacaaatgccacgacagggcaataatgggcgcagtcgttttcggcgccctgggagcactgctgccacccgaccgtcctgttgatcgatacggcaaaatagactggatcggtgcgctcttgggcacaagcggactgattttgtttaatgttgcgtggaagtaagtgtgtcttacatcgattttgtagcagtttggctaacacctcttagccaagctcccgcaagcggatggaatgctccgtttgaaattgtcattataactgtgtcaatcctgttattggcgctgtttggcctttgggagtacaggtttgcagacactccgattatgccgctggatatatgggcaacgccatcatttgccgtcctcgtttttgtggtcctgttgagcttcatgtccaatgggatctttctatggtacatggtcgcttggatgcagctgttgcgaggaaagactatactgcaatttggaattgagtggacgcctttcgtgatcgtggcaacagcgggcactttcattgcagcatggctcataccccggcttgcagctcagtggatactagcgattggctccgccaccatcttgattgccaacatccttctagcaactatgccagtacaacagatgtattgggcgcaggtttttccggccacgatattcatggcgttctgccctgattttgtctatgtggcagcccagattgtcgcaagtaacagtgtcaagcggcggcaacaaggaatcgctgcttcccttatcgcgaccctaaacctctatggtaacagccttggccttgggtttgccggcactattgagactgaggtcaacaagaagagacccgatcaagttcttggattccgggcagccctgtatttcggcgctgggattgcattgttggcggtaatcctggatatgctcttcgtccgagtcatcaaagatgagcgagagggttggagtgacccggccgatcgagaagaattcatagaggaaagctccaccacggcaatcgagctggccacatcaatggtacatggagaccggacgtaggtctgcgcagtctttcactgcaacaatgtatgtttgaggggggtgggggggtttgcgctgaaataaggaacgagtgaagggtcccgcacaacctgcaaaccatccctgccttcacaccatcaacgccttcgttaatctcctttctgttctgtgccaaccttggaagtaatgctcttccgtgatttgctatcggtccctaggctccctccagattgctagtctgatgcattacgttcccttcttactaggcttagtatttctcatattcggttttcactagcatttctgcccaacggacgatttccagcgtcctcatcttctatgattcctccctttttcggttctatacactttatgcatgggtgaccgggccaaccgcctagagcaaccgggaaggcattaaagcaattatcaataaataaaagcttggcgatatggggattaagccatcaaaaagtttgagtaaataaaaagaataagataaaaaaacatacaacagtgaggattcgctggtggtcacccacccaactactaactcaccggcgtgtggcttatgtgcggcagatagtcgggtgggtgtcgcccgggtgagaaatgggtgagtgctgctttacggtcgcgcgaccgggggtgataagggtaagtgcgctatagacagggtgagaatcagggtaagaatcacctaggtcgcgcgaccaccgcattgacccctttagctgaactaacggcagaatatcattggatcatattgtttcccttagaacactcgatatcctggcatctgtatataactagaactggaagtatcatacacctaggcagtaggcaagttggcaatactaatcgatttggttaatctgctcaaaaagctatcttgaaatcgagctaaacgcactcggcgggacttataactattacaggccaatcagagcttagtgtaatttagatataacttaagctacttgcctaactagctagtgactatttcactaaagtataccttatttgtcctgattatttagagtcactggaataaaatcctgtcgtagttgtttcgaccttttgattgatgggtcataatgaattcgactgccttcctcttttactcatctctgtataccttttaacttttcgtgcgttttatcacgcgaacaaatcactatcatagaagaggcctcaaatctcgactgcaggccctcaacttggtctgtttccgccttaggtgctattattgaatggtaccgtacagctgaccactaagagtttctctcaaggtctgcccgtaaactttcatatgagcttcggggtatgatcgaggttaaggtcatttaatgatatagttagtcgggacagaagttgctggctgaggacgtctcttctaaagcaatatcaatttcgggaccttgtgcttttccgtcttccagatcttactatttcctcacgagtcggggcagggatatgaggatgggagctgtatgtataaactcccttattgggcatctccataaccaaccaactccgaatcgagtacaaacgccagaaaacattatggcgccgaaggagattatttcgccgcttgcggagctgctcttgcttgacaccactcaaaatgggtgctatgtacgcggtctgtggaccttggagtccagaaactaactgtttgagtaactacctgggatatgaaagaacagagggctactccgatgtaatatatattggaattatgcataggcttcaagagcatatgcctcttttcatgcgctagagagtgaatgctttgaaccatgtcggccgtccattctaagtcgttattttcctaagcatgtagattgggggggatagaaagagataaacagaagcctaactaatcctcgatccgctgaaggttgaacaaccacgatgatggcctgtaccgtcaacaaaataaaaaggtctgatcaaaaccaagtgtcatcctattcataataaatgtcctgttcatagtaaacggaagcaggagtggtaagtgaccgcaaaattttgggtcaaataattattggcctatacatacaacagaaaagatagcgtgcggttggtattcacaagtactctgagaatttaacaaggggattgatatactcacaccccctttggctaatccgacacccctttggctaatctgataccccctgcctgaaaattaaggtatgcattcctaattgggtaccgcttttgcttcgacacctgtgcctgtctaccgcattccacaccgccttctaatttcatacaccgccttcgtgacaaagtctccatacaattatagtgacacagtaggtacctgcaatttgtatgtaaacccctaacaaaattaagtcactttcgttatattgcactccatatagacaagatcaaacaaattgatacttcaattctggtttacatacattaacttgccttcttccacctcatttttgacattcattttcatccaaatccctccaatttcatctgtttttatcagttttcatcctcaatatggcctcactaggccttgaatacctcgaatacctgctatcctcggattccgagacagagatcgtccccgagtctccacccaccgagccaatcaccaagccaatcaccgagccaagcactgagccgccaagcactgagccgccaagcacccagctgccaagtaccgagtccacaccaagctttacgttcccgcttccgccaatagaccagacgtaccctacctcggaggaagcgattgtctcgattaatacctttgcacgcccgcatggatatgcagtcacctctaagcgttcaaaaaacactaagaaaggggtgaaaaaggctgtctatctctgctgcgaccgtggctgtatatatataccacaggacttagagaagaaacgacggacaactacacttgccaataattgtccctttgcaataactcttcgcctcgacctctatatagacatttagcgcctaactaatgagaatcctacctataatcatgaatcctcaccgccgtctacctatgccattcaacggtcccttgcgaccgacagctgatcgaatgttagaatgggaccgctaatttttagcgcctcttggcccagaggaacatgtattaatccgaattccgagagctcggcgaatgtcagatatcagcgaatgtcgggattcttttaggggttataataccctagtacagaagaagataggatttagtggtaaagataatactgtaaataatgatcatggggtctttatgaacgtctattataagctatgaagacatcctagtataaagagagatctcgacattcgctaagacccctctgagcagatagatggtcgaaacgcggattaacacggattaatatattttccttcacgctaaattagcggtcccattctaacattcgatcagctgtaagcccggtcccttgagctgggtccacgggtggacggtacgctgagtaagctggaaacaggctgcctaggtggtccacgtgagagtgggtcacggtgacacactaacccatttccgcccagaggcattatagttcctagacttattccagctctccagctttccagctttccacctctctatctccacatctccacgtttcttcgtctcttcatcattttcataacactgtcaaccaatctcgtcgcgtttccacgccgtctatcatgtcttctcaacctgtcaatccgcctatgctgcaggaccatgatgccctgagaaaaatgttcgaagaaaaggccgactccatcttggaatggctagaatcgaaaagccaggtctcttatgactatgataccctccgtgaaatcggcgttcttctccaccatatggatgtcacatatgaccaagagtcccttgactttaagcttttatccgagaaagaatacagcacatacaaaatcgacagcgctaggatccctaaacatatgcgccatcactatgacggttttgacaaggcctttcatttgtctttctcatacccactatcagacccactaccaggcaccgaacttgtgtatgagaaggcctttcaaatcgccagatatatcgacatccttcaagactactctaagaaagatgatcccgataatacctcttcgatagagaaaaactcgaactggtatgagatcttgtgagttcggtcttcctctatttccccctattacttataactaccaagaaattgactggtttatttatctagggccgaggattcctttgaggatgggccacaaggaatgttacatggtttacatattgggcattcgaaacctctcgatctttcaagatggagagccgtaagttaccgacaatggcaagaggaccctgaggacccagacacaatccgcccgcatgttatgcttatgatatgcaccggcgcggtagcaaagtctaataaccttctccatggcgagattgggccgattgttaatacaatccagtgccgtctcctccaggaggagtttaagcagacttcgagttttccggtatagacctagtaatccctattataagtgagcgctaaccttataccactattaggttctcgtcatctcgctgtttggcccaagacaggggcgtatgctctatgcccgattcaacatcgacggtactttgattgtacgagcgtcagatatctttgatttcaagaagaagaaccaagagggatttgacctcttcatgcgctactacaactgcgaacccgaagatacggccgtcctatcgaaaactctccatctcccactatcaccatcggccgtacctcgcaagtccggaattgttgataccccaatcacgtcattctccgtatcggagaacgtcccccacgcggattagaacggagtttctagcattattagtgttatttcgtggagacaggtgtgagcggccgcttaatcgtggagaagaattcgaatggagcagggcgagattgttcagtagctagttacgagtatcccatagctaaattgactgtgcttcagctttgtgagcgggttgtgcgcggaaccattacggttagaaggctgaaataagagaaggcctctagcaggggcgtaagtagataccccaggaagccttcgacaacgaacgtaaacaagaagagaacatcatctgatttgatcttgtcggggagagaacgacagcacaagtacggctcgacaaccattattagtttgtgtgtgagccacagctttaacattcagcgagcacagtcagtagcgatgattgtccaaggttgcagagtggcgcgagaacgccaatgttggaataacggatgcatagggatgttaggcagaatgatggattcggagcgatgtggagcagcatatgtacctagaatagatatatactgtgtataagaccagcaaaggttgtgcagaggtggccggtccgaggaagatacgattggctccaggattgcccagaacggaaggtccgaggctctgaggacaaagtcgaacttacaggatggtcaggatatgagcagacagatgtttattagcaaatcgccaggcctatgtagaagatcgcagtacgtaggtagcgactagcaaaggaacaggtagcgttgaaatgtgtgtactggaagtgaaggcaaagaaaacgaacacaacaactctcctctcactctctcctcatctactccagaattcactgtcgtttatccacttttgtcaaaactctcttctataatacctctctgatcaatacattatccgccatccacagctgccatacgcctatcaaaccgcgtgtcgaaatgccgccgaaaaagacgatgacagtgcctgcaactgtcgaggattgggaacaggcagtgcaccccgatgggaccaccattgttgacatcaacgccagcattcacgaccagtaaaagcttcaatctagctccgcgatggaagaagaagacttcctacacctcaaagctgtttggcagaacgtagagtcgaccaacaaatcgcaggcacacattcacctcaggctaggcgcctggtttaacaaagctagccaggatctagacaattatccggatttcaaccggtaccttagtgcagttcagcggagagatgcgcctagctctcgtatcggtatgttctgggctgcttacgagcaacagtgtcaggtcgcgaaatcgcttcacgctacgagcaaggtgaagaaagcatacggtatgaacgaagagcttgtcaacatgtctcttgtcaacttcattcaggcagtatgtgcctgtcatcctggtctagatatcaattgcaaccccgctagggtccacttgaccttcgacttcaggcgggtcaaggacgaaaagcaggccaaagcaattgactcgagggttcatagcctgtcgtgtgaaaccgatggactgcttgagtcaacggctactggtcggatgtatgcgattctcgaagccaaagccagaccccggaaaaagcatgagccgaaagtaagttggcaagagacagctcagatggtgaccgccgcccttaatgaaaggggaacccctaagcacctccatcccggccggtaagtctatgagcgcttgcttcacggcatcatgtactaagacgattattagtgtcatccttttctcgcaggatggcgacgagctatacgtgtccgaggcgactatcagggcaggatatatcaagcatatgaaggacgaacgaaaggctcccaccagggtggacgagtttgttaaggttcagcaatttggtccatattggatccagttgagggaggacatgcaatacttcgcgaagctggtcctagccgttgctctccgagcgagccaggaggaggccacttctgttagcgagcaccgcctccgcccgcgtgaggcctgttgaggtcgtggagacattcccgtttgtactccgggttggagcaagtcgcgatggtcgcaccgaagaaacccttgttcctttgtcatcccatctctcctctctcttcaacacatccaatttctttctagaatggaccgatcaaacaagccctccgcaattggagtgggagcttcccttccccagcccaccctctctgtcaaggacaatgtcgtcgacgcttcgttgcccaccggccagtcagagaccgtgcacctatacggcgctactgtgacctcgtggaagaccggcggccaggagcagctgttcgtcagtgaggcggctcatctggatggctccaagtctatccggggtggtatttcggtggtgttcccaccgcgccatgcaatgtctggagagggtcatagtttaccattttatggtcctaacctggatgcgagaaatcgacagccgttttcagttcccttgagtcctagggttgacccttctgtgccatactcccaatctacattttcgccagagcaggtcgttcagcttctcacaatccagcaacaaaacgaactggttctttcccagaccctaatgagcgtaggcaaccctgcattttcacaggagtgtgcctgcgatttgtccgtcgactctacgttctgccaaacagctttgaggtgtaggaagtcttcttcttccatcgcggagctagattgaagcttgtactggtcgtgaatgctggcgttgatgtcaacaatggtggtcccatcggggtgcactgcctgttcccaatcctcgacagttgcaggcactgtcatcgtctttttcggcggcatttcgacacgcggtttgataggcgtatggcagctgtggatggcggataatgtattgatcagagagggattcgagtcaattgctttggcctgcttttcgtccttgacccgcctgaagtcgaaggtcaagtggaccctagcggggttgcaattgatatctagaccaggatgacaggcacatactgcctgaatgaagttgacaagagacatgttgacaagctcttcgttcataccgtatgctttcttcaccttgctcgtagcgtgaagcgatttcgcgacctgacactgttgctcgtaagcagcccagaacataccgatacgagagctaggcgcatctctccgctgaactgcactaaggtaccggttgaaatccggataattgtctagatcctggctagctttgttaaaccaggcgcctagcctgaggtgaatgtgtgcctgcgatttgttggtcgactctacgttctgccaaacagctttgaggtgtaggaagtcttcttcttccatcgcggagctagattgaagcttttactggtcgtgaatgctggcgttgatgtcaacaatggtggtcccatcggggtgcactgcctgttcccaatcctcgacagttgcaggttcagcttcttccgagaatccaacaagaaaaccaactgacccgtgtccaaattcaatgaagcatgggcaaccctggacagccacaatgtccaatgactctgcaaccgtcatcatttcccccgagtgccgagagggatctagtaatgaaactagacgcacgaatcaaagaactggaataaagtgtccaaagtccggaagataaatccgacccttccccgcctcaatgtcaagacaagtcgcaccattcgagacacaggggcccgcttcaagtccgttcaagccctgcccaggagtcctctgtctctcctagatctcctgcccatctcggtcgcagacaaagtctagctctaatagatccgacctccccgacaggcccattgcaaaataagacacagtctgaccgcgattccaagactgtgaaaagataacatagttccgaaagggccctgataccaaaaacctcagtccaatctaaccaacccatcggttccaagaagcggtccccaagtccttccaattgctaccctcaacgaagaagactggcgaccgcgaagcggttgaatcggataaactccttgatgaaatgcaagaggaaatcgacatgtactgggacagattgcgttttcaacgcatgcaagagaaacttctggcccggactctccaggcccagttgagggagcgccgagctctttgatatattctgaagaaagcgaaagctgagctcaaagacctggacacagctgatgtcaggtctatattgggtccacgaattccacgcactcaaattccagacttcatcaggaggaggatatggggggaacatgcgaggaagaatagagggggagacagatcctagtgtggattaggcgggtttggaccctgatcggcgcttttgcttcttcttttttctttggcttttaatatgactccgtgtttcttacattccggagaagctatcacgaagatcataccacaagttgttctttaattgaatttccaatacttgaactgctgagtgtgtggctagctcgtggagctagataaatagtaaaagcccctacagaaccaggtcatcttcacgttaaatcgagaaagaaaaaggtatgcacaatatgtacatctacagcctcggccccttcgaatgtcccgtatctatcccatcagaactcttccggtccgaaactaactcctgcaccccagtttcgcagtctaacactccgatctctggcagaagttcctgttctttgggctgattggcgatcgtttcttccttaccctcggtcctccggcctggtggaataaacacgttgtagtatcttgggaacaccaaaccgagcagaatcaagagcaaacagaagtgcgctaaaataaacccagcgatcaccattgggtcgtaacgtagggtataagattcaggatacgcgaagctgaacacaatggccagaataggcgcatagacataccggagtagaataggctagaaacgagggatattccagtttctattactactaacgatagtgtttaggtcacatctcaattgattatcctggatacgttagtttctcttagcgcgagcttgttagcagcgggaaatatacagagtagaatgctagatactaaaattgactaaggaaagggttctacccctagaagctagtagctctaatatccggggttataacgacgaggatagaaatagtcgagcagacgatatataacctaaacctagtactagcgctagctaccggattcgaggtactgtatatattgtaatatagcctattaggctgactctgcggaagatagaaatctatataagaaactagataaagacgctctagccgactgtctcactaataagatccttagattcgtgggttgcgagataggagagccgcgctaagagtcttggggggcatcccagagcggagatggtgtgcgatgtcgcagtcctgtaggcgggattactatcatgagcaaagattagccagcttggctcggtcatgtgaggtgacctgcaggtatctcatggtccacaacgagtggatgcagggttcggaggagtgccgaacgagctgaggtgtccgaaaaacagtcgaaattcccttcagttgccaaggggcctcctagattgcgcctagggtgatagtagaaacggataccttctgcttgcttctccgataagagttagattttaggtgcttacctattacgctggtttcataatatttttgatataggtgatataggtgattcagcggcgtgtggcaagactgatacactacctactctgtaccgctctatgttttagcttgatgttgagcagatacgtgcggaatttgtgacttctcgtccagagacctatagaatttcatccaggaaccaatggaatatactacatatcactaaacaaagctctggcttgggaagttgggcctctgaacttcgatactaaaatttcaacatcttgaaagtgagcgggacattaagtatataatgagacaacttctacttgggttcatcctgttaagcactctatgtcttagtgtaagattgggccgggccgtaaaataaggatgtaagtcgttcctcgagcttgagtgctggtggtgccggtaagttgttattaagattaagttcaaagaggaatgctggatagtcaaaagcttctcacgggctttcttattcgatggtggctcatggatgtcctaatcctgtcttgggttcatcatcactttctcgttgccctaacggtctaatgataattttaaattcattggacgcgaatcttcagcgcttgaacgctcatgaggatcgtgtggagatgggaggagaaggagtccaaggactatatagaagaaatgatatattttcataagagactgagatattatatatggagtatagaggtagatacaggattgctaaaatagatgatgggaaatgacgtcagcctcctcttatttttcactcgcccctcatttccatatgtttgtatattgtatgttattatcttcccatctcgcatttcttcttggataatgtatcgtgattctggctacccaatgccgacgtgggccagggatagatgacgttgtggaagggcgccagatttccgtcaagtttctatagtttgtccctctcttttcctcctcctatagtccatagtgaatataactgtgttccctccttctctcttcctgcagtagctttctcctccgctgacactttcccatatagtggagccatctagtacagtatgctcctcgctatatcgcttagacggttcgagcgtactctaaggtccttgaatttaaggtcccttatgaacgttacgtatattataaacctaaaccaagtttcgctgaagtattagaggatcacgtagtctaacctggtcagtaggaaattatgcacatttgcatagcttctgctttgtggtccaacgggcctttttgcctttttcttggttctcaattctattattgttctaccttctccatagtaatatacatattttacagtactgtccatgatatccataccgactctgtacctgctccttatgctaagctgaggaatgctaacaaaatattgtatgtggagttcagtagagtcagctctgcctcggagtatgtaccattgaatactggagcgggggttaatgtcccggcgttgattgcggaggagaataccacctggctgaggtcgtgaacggcgcttgttggaagggtattgccaataaagtatgcacggatggcctctgtcagccccaacgacgcaatgctgactgttgtatgacctgggcctcgtctggtcaccaaccgggacgcggtagcaagctgactctgcaaacgctctgcagaggccaacggagtcacggggtcatgttcgccattgacaatcagcaccggggtattttgctcagtgaggatggagtttgcatcgcggactttcgaggctcccaagttcgggattcttgcgcgggtgtccggaaagtggcgacagaaggataggggagtcacgtcagcattcagccaaggggtatcctcgcggagagagacattgagtactagggaagcaacgtccgccaaggagatgccactggacggcgcattatccacacactgcaggggccattcagctagagacccagtggctggagctttggaattggctggcggactggcggcagctgcattaagaatggacactattggagtcgcatctccttgctcaagagcgctcacaactgaggagataaggggccaagtagtcggaactcgggaaaaggaccacatgaatgcgctgaagatcccaacggtgatggagaacccttgagagaccggaatgggatgttcgtagagggaatcttgtaaattagcaagtcgagtggtcaggtcggcagttacatttgcaggaggagtactcagagcacagccagctggaccagcttgttcgcaaaatgacaccagatcgttgatagcatctcgcacggagagttggtcattgggaagctgggcgacataggtctcagcattggcagtagcatcaaaaacgccgtccaggacaatcctcccgaccctctccggataggtctgaataaattctaccccaaaaatggtcccgtaggagagaccccagtaattcaaacgggcatctttgccgtccaatgcatcgacaatagcccccatgtcacgaacaacgtaggccgcgctagaagtatacgaagctgtcgaattgtaagatgcacatgcggcagcaagctgggcggtcatgctgtcaaactcctgcatcgcagcgttgtaaaagggcgtgtaggattggtttctgaactggccgtacgccacgtcaggcgcagctggaagcacctgggacgcttcatactcttctccggcggtagcaaaacattgcaagacgggttgagcggaacccacaccgcgcgggtcccatccaattatatcgtaaaaccccccggtgatgttcgatattccttccccggcgccgttcacgacgaaggagacaccagacgcaccaggacccccaggattcgtgagaagtgagcctttgcgctgggatacctctaccgtggcgttgtatcgggcaagcggaatagaagctgacatcccgctctgtggctccgcatactcaagcggcactcggagggttgagcaatccaacgctggatttgcaggacagggtgaccattgaaggctggcaagagccgtagatgccgacaggcatccagcaagaaggaagtacttaacagaagagagagaggacatcttgtcttgtgttcatggctcgcatgtgaattatgacagaaatctggcggtacaacaatatatgagtaccctcaagtggtattgaactctaattgacgaaactgacaaatctctaattttaatatgcaccgcgagccgacaaaataagcatcttcaacacgttatcagcaaaatacagtaactaaactctatggcgaaagcagaaggtcaacggacgtaataaattaccatttatgaaaagggcaggttagtgcctttctggccatttattggataagttccgagcgatttccaccacgcccatttgcagtctgatccttcactcgccccgatactccttcgataatatacaccatacaagaaaatattgtcaaagtagagaacaatgtaaaagagcgcactctaacagtacacggcacggttgaaactggccagcggcgaaagggcagttataactcatggttactcgtcacgatcggccttagtcaagagatgtgaaggccgatcccaacaatatttcggccagactgagacattggagtctccggactgttctttgtccctgctgtaggaaagtgggcgcgggttggatggtgagtgtggcggagtggagtggagccgatttcttgcagtctggtttggagtagggtagtagatagtattaccctctttttcctatctatcttaatatttacgtataaagctatataatatagtatatataagatactcctagagtgattttgggatattctatttagagaacatattataagtagtaaagaaattcaaataaaatcataatagagtgagaaaagagccttagaggttatattatatatttttcttagggccggtataggcttggaataagttagcccttattaccctaagggtgagaattgtcaccctattcttacctctctcacccatatcacctatgctcaccctagagtgccgcttaggtactagggccaaattgagtattgactatgtagaataatgagcttaagtacggctgagcggacgggaagccctgttttccacaccctatggtcgtatgtaccgaaatgtatatcggaataggatatgtagtacggcaggttttagatgtcatcgactaattcttcaccgcaataataattcatatataggccaagcatatgcctacccgcccggataataagatatttctgattcttaaaccaagctgcttatacacacaagcacttccaagacctccgatatccgcggtttggaaaccaccaaagaaaaatcatacttactgtgaagacagcaagtgtggatgtggtgaatgaacacacccgtgagaatctgaagcagaagccggcaagagccatcggcgaaatccctttctcttttgcgcatcacactttagctgttccacgtcagtgtattgacaggtccagcatttgtgtatgatttctcgggaaggaacctggaagaccgtcaaggcttggaaattggccaacagaatatattcgcacgatttattggtagtcactatcgccgatttcgtcatatgggcgcagtccagttgtgatcttgaatatcagacaacctagcgcaaagatatctgtcgcggtagaccgaggagagtcaggagctattcgataccgatcttcctctgagacaagagtgtcttgtcctccaactccaattgctgagccaaagaagtcgcagagttttatggacaagtcagcgacgagaaagttccgtgtactgatatcaacatggactgcggcaatgcaatcattgttaatttgactaaacccaattaggaatagatgatcttggctcaggtgggtacccgtccgtggatctaccacggcgccgtgatcggtgatgagctaatccgtgtagttagcatccttcatctctactagccaagatatcaatccaatgcacgtgtcttcggcaaaaattccttttccaaggttggagtttatatggctcaagcacttcaatcttggctggcggtatatcttttacacactactcgacacctactaaatttgttcgaatgaatgtgataactggcatcgagtgacacagatactctagatcaccattggagagtggaacaagcagacaatcgagttgtgtgattaattcaataagctaggctataaggtaacatctttgcgtcgtttcccaaaaaggaaaataattcgccctcgcggagggatcccgacggggccatgctaagcttcacgcactgacccccgaaggtggctaattagacgattatggcgtaataacatagtacgatggtcgcagctgaaacacacgctaagctcaaggagtctccacagttctaagagtgcttggtctataactatttccccttaaaatagtgtgattctctgaaagataggatcagctcgagattgttatacttacaaactgcaaatcgagaatctgccccgtttcctatgggtatcacatacaacttggaccgaaaacagggactttatcaaagtataatcagatacgtcttctccgggcgcgatgatgccatttcggccccatgccgacgaagagaatataacctggaagtcaagaactatgaatttcagttatctgaaaagatgagtacaatatcccctagcccgaaaaatgccaccagcacagtggctcccgtcgtcgagacccacctgaaagaggagagatctctagtaagtatcatgacctctaacgcatggacttatagactaacggctgcaggtatggcgtctggatctgtttttcttgaccattggttttctaggctatgcattcaaatatctggaccagacgaatattgtgagtacgttcgcaatctggaaaagaacacactctgactgactatctgataagagtaatgcctatgtctcgggaatgcagacagacttgaagctatatggcaatgagctgaactactttacaacctttttcaagtaagttgttcattgtttgatagtgatgtccctgctgatccgcaatagcatcgggtatatggttatgctgtatccctcatgcatcataatctcccacatcggtccgtcagtctggctacctgcctgcgaagtaagttgaataaatccaaggcttatatggatgggattgaatatactgacaacagataggtgatttggggtgttttgacttgctgtttatccactgccactagtgcaaagcaggtaaatacattcaaacccctcgataatatcttccccaactcatagaatcctaggtatacggtcttcgattcctaatcggctttttcgaaggtgccacttggccaggttattttactatcatcaggtgaaacgcacagctgctctgccaccaatatatatactgaccttgtccagccaatggtatctccccgaagaaatggctcttcgcatgagtctgtataatattgcccaaccggtcggagccatgttatctggtgcgatgcaaggtgctctttcaacgaacctcgagggtgctcttggtcggagcggttggcggtgggcgtttatcatcaatgtaagatatttggtatctacaatggggaacacgtcctaatcttctagggtgtctgcactatttttattgcattagttgcatttgttctcttgccaggatttgtatgaacctgtctactcctctagcttccttgcagcatgctaacagaccctatctagcccgatcgccccaatccgcttgccaagatatacctcaggcctcgagatatcagtatgtatactattctggaatcacattattagaaatacatctgctaatatagcaatgaagtcgtcgccaaagagcgaacccgtcggatcaaccgcagtccccaggtgggaatcactgtcaaatcattcctgcgcagcttcaaattctggcatgtctggttatttgcaagtgagtcgactatatctattcttttcttttccaagctagatcattctgacactttatagtttcctggtccattggcacgggaactacacctgcaaattacttcaacctctggctcaagtccttgaaaaaccccgacggaacgaagaaatagtaagaatcagccctcctctttctggcgacaaacctgacagtgtcttcagctcggtcgctatgcttaactacctgccgatcgcgggccaggctatacaactggttgctgagcttttgttcagcggcttcagtgattatctgggaaccagattaccatttttgcttcttcactcggtgagtatatctggcgagcagagtagagcggcacctatgatactaatttatattttctaggtcataaatatcacatctcttattatcttgatcatacggcctgcaaatgaacatgcgtacatggtcggttggtatatgaattacatcggagcgtgagtgctcccattctactcaaaatttgcaaaggttttttctctgactgaaatagtgtgtcgactatgctactttgtgcatgggcatcttcctatctagagaaagaaccacaagcccgaacagtccttttcgccactggaactctcttctcatacctgttcagtgccttcttgcccattgcggcgtacccggcttcggaagcaccccattggagaattggtgcaaagctctatcttggtctctcttgcttggctactgcactcttcgttgtcatccatttgattctcagacatgaggcaaaacgagataagagaaacgagacggctgaatctaggtccgaagaatcactgtaatgggagtctatccgtgaaggggatgcgatatcgataggtagagcggctgtgatgcatatatattacgtgactacaatacgaaggagaaccgatcaatagaatatatgaatgatagccgattataatctaactgctgccatacaactctctctagttatagctactagacgatcacgcacaggttatgagatcgcgaaaccaggaccgaaaatacaccagtaactatttggtggctcctcgcacacgtatcacgtatatgggcgacgaatcgtgccactacgacaatgggactttttggctcaccgctctaatcaccgccttagtaattatggttttaggacggttccatggatatctcctttggtaaacactgctggcatatggtatataaaatcgaaataaagcaattgagagatgaaaaactaagagatcacctgttctaccataaagctattcagagatcacctgatttatcattataaagattcgagagattacatgatctattacggagtatcatgaagctattcggagatcacttaatctatcactatggagcaattgaaattaattctactaccactaataatagagataattaaatcccaaaaacggcattttaatactagatactacttactatctaattaattaaatacaaccggtattttacgctattcatggttcaattgtacgaagaagtgatttaattttgacgatatagatcagatgctacggagtacagagtagtccaagaaggtaaaaataaaatgttgtgcgcaaatggtaaggtattatataatcagatcacgtgcgttgccgactaataatactggcagaaataacaagatatacaatatagtcgtaagagttgggggaggggcccttttataccccaaaaccacgtgccttcctaaaatgcgacagttccctcgagccttctttgtcaatgtcaatgtcaatgtcacatgcattgcaccttctttgtttgccttctttgtttacacggggaactttcaatgtttgggaaggaacgacattggcttcagggcatcaagtgcaattgaagtccgatattagatcgcttagggaatgggaagattggaaaattcagtccaagcctaaaatatcttccaaaaagatcaaagatcgtgctgaaattgttgaaatctgtaccagctggatcgatgagtggcgtcaccgtcacccccaacacaagaaccctcccattgctgctcactatttcctcttgctcatctttatcatcacgatgatcgcatggtatagataattacctctctatatgtataattgtagtatccctaggtagcagctctatgaatttctttattgccagcgatgtactcgcttttttcaaactcaacctgctatgaggatcatatactatactaatacatctttcagtacatacgaccatagggtgtggaaaacagggcttcccgtccgctcagccgtacttaagcnnnnnnnnnnnnnnnnnnnnnnnnnnnnnnnnnnnnnnnnnnnnnnnnnnnnnnnnnnnnnnnnnnnnnnnnnnnnnnnnnnnnnnnnnnnnnnnnnnnnnnnnnnnnnnnnnnnnnnnnnnnnnnnnnnnnnnnnnnnnnnnnnnnnnnnnnnnnnnnnnnnnnnncgccggtgagttagtagttgggtgggtgaccaccagcgaatcctcactgttgtatgtttttgtcttgttttttatttactcaaacttttgatggctcaatccacaggtcgctaacttcaaccacgagagtgttggatatgccaacgaaatccactctagcgtctagagtacctccaaacaagcaattcccatggttcgccccacatggtcactttaaccctttactcgggcctggatcatcttccctctcgtcttcatctcaacttgctgatgacttccaggaagaaagcgaggcttacgagacttacgatacccccgcatatctccagaagattgtcgatgatattcgtaacctggaaatcgtgtatttcaccggtcgggatagtgagtcgattccgttttctgggtggtatgagtagatctatatattaagttcaaacctcgaaccttcgcgcttagcgatctagcaaacaatctatctaatgaagtaaacaatgcaaacagcagatagttgctgatccgtagagtcatagaacagacaatcatgcagacggtaataaatgtcacgatctactatagatcgctatcacatgcttcatgtttgcttgcttgctcgtttgcttgcttccatagattgtttgttaaatagctaagcgaggtttgcaacgtttgcaaagtggttagcagctatataacaaggttgtttcccattatccacttacttactcttcctctccatcttcggtatttcgttgaatacactctttctcttctgatcgacttggcgcttcgcagtccacactttgataggtcagggcgtcaactggccctgcctggtcttggcgctttggtcgctcggcaactcatctcatcacattccccccccagttatcctcatctaaacccactcctattcatcatccattttcaaatccctcatcttacgaaatatgtcttcaaaaattcaagtcgtggaaacacgtgaacgtcaactcgagcgctgggttctgatgaaaatcgagcatgcaattgagaaacttgaggagcataaactcaacgcgacagaactcgagaaatggaaaattagcttctccagtatgagtctcgatcagaactcagagcttaagccccgcttcttcgcaccgaaacctgacctcccgccaccaaacgatgagatactcgataaggccgctgagcctaatgatagtgatggacgctattatttaggtgcatacgatatgaacaatttcttaagctcttatgccttccaccaactaggcctccgtgataacgggccgtggcatttgatagagtaagtctattgctgtctggagctatatcgggccatcaagggttgggtatttgtcatttcctgtagaagcaggctgtgagcttcatggactattatctaacgctagtcgatagccctggtcaatataacgcttacaagagcctttatttccatgggtctccctcgcttggcccgtctcctacatttggcgcttttaagataatagatagtcccggaaaggaatatccgcatcttaaagcagtcatatataccgatatggaggcggatgacaaaacttgtttccgttcagaggtcttgatcagccttcgcctaatgttggcccaattgagaaaggtgcgcctgatgcaccataagatcgcaccggtaattatcgattcttccctttctcctattcctttattctatgcttctggggttactaactaagtattctataggtcttactcgtctcgttgatgggaaagcatgtacgtatactagagtcctattttgatggcaaattgcttcaaatgcgctctactcgtctttacaaaatctccgactgggactcgattaagactgtgtacatgattctcaccgagtatttgctcggccctccaatcagagataccatctaggctggggtatcttcttctattcgggttggcatgttgaaatgattgaatgaacatcaagtgacttgaggagatgtccgacggcccagccggggatccacatgcgcaatgaacagataaaactcccatttcccccagaaaagatagatattcaagcaatacacacatcatgaaacaaccaatctcattgttcccatactcagtaatctaaacatcaacgtggcataggaggcttcagggaatgcactcttcagttcaaactcggagcctgccatagcccgaagaggctacgacagagacaaaaatctttcaatctcaagcttcttttggggcgtcatatatataacagacttttgcctttggccatgatggataggggatcgcgtttccagataaggctcaggtgcagccacagaggactcaggccctccttaagcctacttcttgcgctgataggccaaataattctagtgatgatgattccccaaattcacccggaccagtcgcctcatccaaggcaaatggagatctgtcagggtcgggactcctaggaagatgcctgactaagccaagttttgcagcgccattatcaagagcaaatatatgagtgagaaatggattccatactaagaagtacagattttgcaagataaaataactctaatatgtcaaaagagccgtgtgccttctttctgtatgtacaacatatattgcagggagtgtggccacgtgattacagcattattgttttgggtctggtggggcggtgtaggcttgtttactttgcgttaaaagtggatacaaaccccaccttaccccacctgggctatatatcgtatcagccgactgcaaagaacctcatttcacaacgctaggccagtggagttgctgttgaagggtgctccagtagtattgagatggtatcttgggagtgtcacgctgcggtcataagttatataatagggatatggttgagaatggcggccagagtattatttgattgatcacgtgcacctggttggtctgtaaataaaacgagcgcaccttactcttcacgtacatacccctacatttgagatttcccatattatatctctgccatcatggaatacgataggcgtcttgaccttctgcatgaggtagaagaaaacatctggcttgacaaagttgtaaaggcccgctctgtggagcttctgcacttgggtttcaactttgcacccacagcaactcggtggccttcctcgtgtcaacagtctctctggcagatatgcagacgaaaaggttgccatggaggttgaggctctccatcttatctgccagatagacactgattgtgattgagagtgcatgagaagtttcagaaatgcatcatcagcggctggctacacgagcctatcatctcaagggaaacccgaatgttcatcaaggattgatgcacgtcaaggcacaggccaagatggccagcactatagggcccattacttctccaagggcgcgaagaaagcgttaaaataatcaatgttattcgttgagaggtgtgctgattatgcactggccgccatgacaaaaatcctcggcggttagagaagttggatagatcaccaacaaaaatatgattcgatctcatgaaatgaaggatgaaagattaaacttcaagcatgccaactctggaagcacagtggtatagtggtcacagatgaggttggttggcccacccgggcgtatcgcagtggtcatgtgcgaaggggcagagcggccaaaggtcaaacgcctggtgatcgcactcagactaggggcgccaatatgagcattgaccatgggaccaacgtgagaggtcaggagggcccccctgatctgatttctgaatccgtagggttgatgcctaaatgtgcctgaattatgccttattttaaactgtatattataccacctggggcatgacagagggcttaataagcaaagtatctttccaaggttccaatccaaggttgaaaaaatgaggctattcccaccatacaattatccgcatacacccatttattcataggcgctaaagctattgcgactgtacaaatgatttgtggggtggaaatagcttcaattcaatggtttatgcggtcggggacgggtttcaacgccgggattcgaaaaacctgatgatttttggggtcgaaatacgtagcttaaattttgggaagttggagatttgtaggaatagcttcaacttacaatacacggtatagagccgtgtcgaaagcggtctatagtacaggcatattcaggcatattcaggcatcaaccctgcaaaatcagccaggcattcgacctttggtcgctctgccccttcgcagtcatgtgatgggaggctggtgctatccgaacgcgacttcgtgtgaacttcgcttccttaacaagatgtacgcacgcagagcttgcgagggctttcgatataggtctcgcgtactcccttcttctagagtcggacaagctgtcttgacttgtattccatttcagaatactgtcgatatggaatggttacgacgtttgatctcgcgccagacgcacacgtcctcgacgcctgtttccccccggtcgcctactaatcctaccataagactgcgatgaggagagtatgtatcactacacgtccggtcgatggctttggaatgagaaagaacagttgtcccgtcgctatgtcaagttcaatctggcagagctcgtcaagatcgcaacccgcgcgacagggtcaaagtcctgcgtcgaagtgcagaaactcccagaaggaaatttcagcaaagttttcctactcacgatggaggatgggaaggaagtgattgcaaagctcccgaatcctaatgctggaccgcagtactttaccacagctagtgaggtggcgaccatggactacgtgaggaacactttgttttatttcgcgacgtgctattttatctgaccccgatttctaggtccggaatgttctgaatattccagccccaacggtgtatgcttggagccttcctaccgaagagattggagccgagtatagcattatggagaaaagccgtggggttgcacttggcaaggtgtgggatgatctgccgggtcctgataaacttaagattgttcatcgactcgctgggtttgagaaggctctcgtatccacccggtttccgatgtatggaagcatatattatgcagacaacctacgcaatatcgacccagatcaggtgattgagcttggagataagaagaacaccgtgagtgtgaaatttgcggttgatccaaccacgaatcgaacgttctttgatgatggcagaaattctgttaatgtccagcgaggaccctgttagtgtctccctcggatcgctggcgaactgtcctaatggatgttttacgataggggcatctcttgaagattatgctttcgctcgtgccaaccgtgaacttgcttgtctgcagaccttctcgaaattcccacgtccacaaggattattttatgggccaggtcaataccagcccaccgctcaacgaaagcaagaaacactgcaaaatttcctcaagattgccaagtttctgtcgccgaaagacaaagagatatctaagcctgttctgtggcaccccgatctacacggagacaacattttcgtgaacccggatcagccaacagagattatttctattatcgattggcaggccgtgaatttgtcgcctctatttcttcaggctcgccatccagccctgatagaattcgaggggcccatccctgagggattgaaggcaatcagtctgcccgacaatttcaatgaactcagtccagaagaacagctcgaggcgaagaagcttcgtgctgcccagtctctctacaaacattatgatattcagatgatcgaggactgccctgagattgcagctgctctaaagttcaaaaattcgctcgctggccaaatcatgggtctttctggctctctcttcagcgatggggaacccattgttcagggtatgctcataagactccaggaagaatgggggtctcgtgttgggtcatccattccctgtccactctctttcaccgaggaggataaggaacatcaaaaggaggacgagacaaagtgggctagtggtgttgaactaatggaggaattcctcggtcaagtcggtgcattgggacggttgggtgaatcacaatagctacgagcacttcaaggcgcggctagaagaatgccaggaagagttctggaactctcactccaccacaagtgaagagagaaatgagtggaaatcagtatggccttttacagacggccaatgattttcataggtgggtaggtatatagcttaaataggtttgttcaacgccgtcggtgactttctagttacctagcacttcatggatcttaggtagatgatatacttgatcaccgaaacattcgttcatatgcgacactgtcacaatgggctttttgagctacaagacatgcgcatgtgtatgggtccgtgagacaaacccaagctacaccttccaaagttaattccaaggttagttttctcacggtgggcgtttagttcttagctaatcagccttttcgatgggagtccatctgataagcgaggacttccatatcggacggatggcggaacggaacaaatggcgactttacgacgtcattacctgcctccatactatagaaaaactgtccaaaggctgcaagtatacgtgtgccacagctatatcattatctgagacccggtctccgattatgccattagcggtgcggcgtgaccggcaaaatccatagcagattatgatctagcgcgctggcacagactctgtacatagaagttgccctccagggctatgtggattgatgatgtcatttttgccttagtcaactatgacctacggggtaactaactatgtatggagtatctaggtactgaagaggggacccctgaggggtaccgacagccctgcctgcgaaacaggtgtgagagcagagtcgtcactgggagtaatagggtgctagagaggagaacaccatgaggtgactactgagaatggaagtggaaaggtgtctgcggtgctatctagttatgcctcgggagtgcttttatgtcacatagccgcttagtcatcctgctctggaaacccccactgcagtacctaggtacgcttgtaccttacacagattgccgtggctccaaggttataaggttataagtgatggtcacttgagattcccaattcaactgaactcgtgtaggtctgtgcatcagttatgaattcggtttatgtccgaagatctcccgaatataggtattccttgattggctatggaggtatggtatgtaatgtaggtcccggtgtacataggtgtgtgtccactgtcccctccgttcctaacttcatcttattctaccctcggaaccagcagggatgacttcatatgtagctttcgtgtgggtttcccccgggtctttaagtggtaatcaggactcctatccacagatatgggcaacggctgtatgtagttctgacgtcaggtcgtgtggagaatgccaagaatggcagggacctctggatcgcagatcgaaattgacagggtacttttattgtacttcttttagggatattcacacggatattgagcaagaataacatgagactttaaattgtatatatataaaaaaaaagaaaggttctacaccttcaatctcatcgatatcagccctaaatctcgatctatactgtgttatacgccacggccgccaccactctgtggtgtagatccactataaatccggtttcagcccgtggagtccccattaacacatacttggtacatacttcctacatataacacctggagaaggtccacaatcttttttttttctccttccccctttgctccctcccccgcactcaaggatgtctaccccagggcaacgagagcctcaggctgttcaccatgagaacaccgacagtgaagccagcgtgcctgtcgatgtgtccgccgcaattgaaaaaaaagagagcgagcgttccgatggaaagcgcgagctgaaggaagatgagtgctacgagattctgggatactgctggccacgatggaagaaatggacctatctagccgcggtcgcgtgcgttcaggtctctatgaacttcaacacttcggtctaccctgctgctgtcaagggtcttgccgaggcttttcacattagcgagcaacatgctcgcacgggccaaatggcttacctggttacttattctattggctgtgagctgtgggctccttggtccgaggaattcggtcgctggcctatcctccagctctctatgttcttgatcaacatttggcaactacctgcagcccttgcccccaattggggcagtgttgttgtcgctcgtgcattggttggttttcttccttgctaagctagcagtttaacaatttgatgaactaacatgatatttagggtggtctctctactgctggtggtagtgtcacactcggtcttattgccgatatctatgaacccgagacgcaacaatttcctctggctttcatcgttctgtcctcttgtattggtaccagtattggtggtgtgattggaggaccaattgcccgttgtaagcagccactactctcactctgcaacattttacaacctagctaacacgtttgacacttagtccttgattggcaatggttcttctggattcaactcatcttcgggggattcacccaacttatcatcttcttcatgcctgagagtcgttcgaccattatcatggacagagaagccaagcgtcgccgcaagaccggggaagacccaaatatttacggacccaacgagctcaagaccccccgtgtctccctcaaggaagccggcaagatttgggcacgtccattctacatgtttctgcgcgagcccatcgtgctttgcctatctcttctgtccggtttctccgatgctctgatcttcactttcctggagagcttcgccatcgtctacgagcaaggatggggcttcggtaccctcgcacaagcgtgggcaattattccaatcaacgcagcctacttcatcgcctactttagctacttcccgtggttcattcgtgaccaaaagctccggcttagacatggcgatgccgccatcccacccgagcgccgtctcaagtggctgctcttcctcgccccactcgaacctattggtctattcggttttgcctggacatccttcggcgactcaagaaacgttcattggatcggatccatgatattctccgcctgtgtcggtatcgccaactatgccatctacctctcgtctgttgattatatggtcgcttcctatggtgtgtattcagcttctgcgaccggtggtaacgctttcgcgcgtgatcttctcgctggtgtctcggccatgtacgcgacgcctatgtacaaaaatatcggcaataagtggcatgtggagtatgcaagtactattctggcttgtctttcctgtctcgttgtgactcccatctatgttttctactggaagggaccgcagcttcgcgccaagagtaagttcgcctctacgcttgctgccgacagagagcacaaccatggtaggcgtgtcagcaggatcagtgtggagcctgagtattgagctttgatcaaacgtgcagttgcattattagaagttttgcatagatatcttgcttttcatgcgttatgtatatatgactcgccttgggcgatcagagaattttagacctcatgacaattagagctagacccgaaacaattttatttcaacatactactccgtacatatttttagactcagctttcattcacatttaagggggaacgtatgatgaacaacatgcgataagacgcaatgaccaaaaggagcgttgagcagtttgggtggggaagtacacgatggatgcagcaaggatacagtggggtccgctattgccttccacggcggaggtagatgcgatgctctttcaaaccctaatcacatgatctgacaagctgaatgatatcacagcgtacagataccgttctgaaattacactataacaataccgagcctttacctgatacctgtatgaaagttactcaagtctcgaactgaggggcttggcagactggaatgttcgatgcaaatagagcaaacttgggtcgcacaccctcctatcctctcctagccctacccgggattgtaccacagatcgactacagtcaagtcaggtaaatttccttccctttgagtaggagaaaggcgatgaatacgatgggtatcctcattatgtttgctacactatcgcctggaaactggtactcaaccgcaaaacggtgggtaaagtgaccgaagacgacttggtcgtagcccccagtgagtactaggacggaacgttgaaggcaaatgttaaggacatattgcaaatgaaaaagaagcgaagccaacgcgttcgctctgaaggcacacctgtcaccgtgtcaacgacaaaatgttgaaggatttgagaaattctatagttctactaacattgattggaagccagtggagaaacagctacgtaagttacgtaagtagagcaatgtcctccgtatgggtaaaaagattagagttctcattaccttcaactacggccacgatgataacgatcaggcgagaccatcatcacggagagtcaagaagagaggccgcgtgtcggcaattagtcggatgctggctgagcataaagcacatattgatacggaagaagaggccaccggacggccttcaacctggagtctcgtgtatgatcgtatgcgatgtgtcattcgctcatatccactcatgtctgattggtgctgggaggatccaaaggacaagaaacattataagcttagggccccgtaccttgaacgactcattaatcatgttgacgaaggtggtagtctaaatgaccatgatgatgtccctagtgatatccgtcgagacctcattttagaaagccagacaggaaaaaaacccccaaaagggtagcgaagtgaccactggattgtcatattccccgatcagtatcaatgttctcctagcataagctgcgcatacttcgacaggcgctttattaccttccagaccagtctctcatgagagtcttatgatacctgaaactcgagagcaggctatgaggtaatactgtaattggctggaatcacgcgccaatgacgaagattacaaagctgatttccgaaaaacatgccaggtaactttggaaaatcgcctagaccttgaattgatcctcgacgaccctgatgctggcttcttcgttcagcgaggaattcaaattagaactgctcgtcgttttttgcgcgacatcaacgaattgcaccgaaacattacacatgaaccgacctctggcgagattcttgatgttgcagggtagagccaatagctgttatgttttgttatcctatgcggctagctccacataggattgactaacagcatgttatttctttgggttaaggcgtaacgtgtattgcatttggttcataatagctcacatttacatcattgccctgcaagattattatatacaggacgtcccgttcctggtgtcaccacctacactcttccattgatactaccaattgaggcacttttgatgacattagctcaatgcacaaaagtgagtggtgctgctcgtcgctgggttatatcatgccatctgtaatgattctatgcaagcttaatagaatgggcaattcaatagcaggggcagagataaagtctttgcatttgcacaacagcacaggaaaacccgaataagggaaaacctatgccaagggagataaaaaagaacagcagacattgaagcaatagaggataaagcttggtagacaaaactcgctatcaaatagacgtcggtacggtaactgccatgatatcatataccgcatttatcttggtcaagtctttcagagccactgctttgcagcctgaagatccaatagctcccactggagatcagatcttagttaacactgtattacagtgaggatacccccagccaaggtagatagatcacttacatcgtaatcccaggcaatcaccaagggttggcaaataacaagaaggttaatcgaggtcctgatgtatatgttaacataccattggaggatagtctggaacacagtcttctcttaccctctccagcattggtgagttctttcaagtcactttcttagcgaatttgacgacaacacttctcccccacttccagagggattcatcttccagacatttcttcgcaattttgcaatttgcttcgttcccatacttgtctgccatgtccatgttgctcataataaagcccatcgctttatcgatcgcacaagacttcattctctcaagttcaggtttcttgcagaagtttgtccttttctccgccgcacattgagccacaatcgcatccgctaacggctttattttcgctctgtagtttggtaatttcaaccccttcttttgcaatttgtcccatagaggtatgagtacctgcttctccagaaatggccagtcatctgctccaggactcttgcccttggaacagacaagcttatcgaagcttggccatatttctgtctccaccttggcgccaacccccttcatagtattcatgcatatctcgtgcgggagaccgatactgattgagaagccagagaatataagaagaaaaaaggaaacaaatctccactgcattatgatggttggtatgggttttggatttgaaagtaacagatgcggattgttgatatgtctgatgatgggagatcagggctttatagcaaggctttctttactacgtagagcattcaagcgcgtgagccactactggtcaattgagatgggatctacgacgtaacacaataaagaagatcccttgcagtcacaatattgtgattcaatggtagaacgctgtatgtggggaatgcgataagcctgccaggactgctcctctgcgctttgattggacctcggcgtgtgatcgggcagccgatcttatttgtagatgctcagtcaccgagaagtagcgcagggcttgcgataactagttcaccctgtcctttgtaacttcgtgatccgatcggcaggactattgatttgaacaagtagaaaagcccatccaatgaagggtctcagacagcgagcgggcgatcttgccagatcgccagatctacatggtgattccgggtggttctatgtaatattaatctactataacgatgactcacttacgacagtatacaatcatttacataaacggttctaccagaagtataagatggtgagctaaaagggagtagcgttgttcgacttattttccaggaattgagtgcgaatagtgtgaagattcaactgatttcgaagactactgtaccaagagatacttatttcagatgaactcagtagtggcgaaccctatagttagttaactatgctgcagtttccttatgagtaatacagcagggcgatcttcaagctattggcagagtgctggaccacataagtgactagggagttattacgagagatttggattcttggaaagattcaacttctgcctttctccacccactattgattttctctagcgctgcaaccaggggcaagacattgaactcaactatcacatccaggcttggcgggtcgacttggcgcagaatacccctgacatgtgtcaatgtcgcattgaattctagtttataaaaatgttaggactacctactagcgtaccctgaaatggaggtatcgaactagagtggaggttcccaagatggctcatgcaattcattagactaattgctaaggttctaatcccatgtgcgcggtgtgtgaataccccggcgcttacttagcgagtacgtcgagccatacgggccagttgtgcaggtgaccctcggggtcgtaacaaaaaagaagccaatggtcgacaaccaaatgtgacagaatgggaaggggaatctgtcgagcgacagagagattctggccatatgaacagaaatgatcaacgaaaccttggcgggctcagaaatgaatgatgaagtgtattggtcgagccgatttcgagaatgactataagtaaggcaaatcactcatgctcttctaccgttatacctgcatgccagaaatggcctccagcgctttcattcttcgcaccaacatcctgaacgcaccgccgaaggaaagcgtgaaacccccgatcgcagtcttcttcatatgttgaccaatatttcttgatatgcgccttaagttcggcaaagaattcctcgatggggttaaaatctggtgtcaagtccagtggagaccaacccgtccgcctataacccacccgtttatcgcacccagactcattaacgaaaactagatgaaacgaacgcaactttgacagtttgtgctgataaaaatctcgtaactgtggatttcgttcgcttgctctctgctatgctttctttttcgaccacccagcccggtatagtgctcgtttaatgctggatatcgaaggtatcacgttgaactcgtcgaatacgaagatagccatctcctcaacatagagaccgggtttttctgcgaggtggtcaaccagggcatctaccattacttatgtgatactcgatgggcggctgggagcaattgggggagacctggcactgccgaataaccgcatgttctttcggatgttagtaacagaacgctcgctgcatttggctacctggccatttgtgatgtggtatgtctctttttactgcataacatgtgaacaataatgtcacgctgccaggaatcgatatttcgcgccatctagattgggaggatggatgatatactgggaggggggaactcgagggagaggactgcgtgaagggaactatttttggagctgtaattaaacacgaatatacaacccactcctgttttatacgagtttggtattataccttcgatatcggaacattgttacaagtgttttggctaaccaaaataggagtaagtatcatgtgattagggttgcaaaaggcatctcatatacatccgtcatggaaggcaataacggacggcattgtatgcaatcttctatatccacgcacttctatcatattgacaccatttatttgtatcccctttctcgcgcatccaacactccctaaccacaccaccgacaaaatgatcacaagcacaattgaaatagccgcgccgcctgccaaagtgcgcgagattgtacgtagcattcccaaaggccgaattctaattccttgctcgacaagctgaccagttgtcgcgcccgcagctcctcaacttctcagcatacccggaatggcatacggaatggctcaaggggatcaccctcaaggacagcaccaagaccccgcaagaactttcctcaggagacaaaatcgaagtcaacatcgagaacttcaagttcgtcgctgaagtcaaggtgagaacaacaaacttccccaaagaaaggaaaggaagctgaagactctcaacgctcaaggagaacaccgagagcttgttttcttggcaaggcccgcccgtgtttacaattgctggtttgcataaattccatatcgagccggccaatgatggagcttcgactgttttcacgcagtctgaggatctcaagggtctccttgcattcattatgagtccgtctctgcttgggaagaaaatgcgcgcccatttcgatatcttccacagggatctgaaggcccgcgctgaatcggcataatttaggggggctggatttgttgcacacgcacaatctgccgttttatgcacgcactttcggtttgggtttgggtttgggtttgggttttgtgttatcagcgccttacctccactacattcctatgcacgacgtatacacacttgcaggcaaggtattggctcgggagatgtatatcctggtcaccgtttcaccgtctttcagggatggtagacttggaagcttaatgaaataaggataaatgaatgacttctgcgcaaaaatgaaaaacacgccttgtcagttcatctggcctgcccaatgacggcagaataagcggtctcatattaaattcgctatattgtagcaatggtctcgccgacaatggcgcgatggacttgaccggtcgtcagaccgtggtacagttgtggcacaccttggattgcagcctagggaaaccggttacacctcacacctgtggccctgggctataccgagagacgtatagcaatgtgtcacttcctcgagtatgtagaagactgacagaccgagggctgagtgaatgcccacttggcagaccaattaagctgtgtttggattgtgatgctcattatgacagtgttgccaatgaaccttttttcggtgatccaggctttttcacacaagccatgctctgcccatagaaaatgttgaataaaactgtatctcatataaactcaacgctactgctgtatggcgagaccgacattgagaggtctgataaaaccgattgatccatgagattgaagacagtgtcccaatgagaccgaaagaggtctgcactctgcggtttctctaaccacaaaacattttggatgtggacaagggtgtcactaaagttgctcagttgtagagcagcagctatatctcgtgccctgtccatgaaccaccgatgatgagtcgtgccagctgaagccaccatcccgaccgcggcaaaccagacatcaagtgagtcaaatacacgacgcgttgacgccagatgctcgaggtgctccataaatcggatgacaatcgtattcagtatgactgcatgcgagtaatatgttggtccctgagcaatgaacatgtagattatgattccgtagcgaatggattccgtcatcggtgatggcggcggtcttgttgtaacctgggcagatagtaggagtcggtgtatgacaaaacaggtgaggtcgtgaagttgtgtggatgggaaaggtatattgcgcgctcgccggaagatgttgcgtagacgacggaagacattctcaacggcatagtctacttcgatggtattgagatcaaatatttgatcgtcaagcgcggtcgagtcgaactgccattctgcaataggggggatgccatctccgatgccgaagtcatcttgtgtctcgaattgaggatgacccatgatgagcattgataccctttgcaacatgtgaatagcgattctatgggtggcaaggagttggcttaccagctaatcattctcgcggtaagcgggcttgtctgccttactgcgttgatgccgcctctcatatcgaccagctttttcaacccattaacatgcatttcgccaacttttatattgcctttgccgaactaagagccacataatcagggatttgttcgaattctaacacagtagcaaaccagggtgctgtagtgtctcacctcgatggttgccaaggtgatgactgagttcatagtcccatcttgaacagctagtgacatatattcaacttttcgtcgtagtaaagccaccgagtctgccatgagaagttcggaagtctgaaagcccttctgggccaacaactcttcgtcaagacatgctgtctgtagagagacgtggaatagtgcaggatcccctagggcaagtggccaccaagagatcagaaacggatttgaagtcgcattaaggtcaagagggtagtactggaaggcgattttgtggaggactaaatgggtaagctaagctttcctcgacaatgctcgattggcggcctacatacagctgtatatcagacgttggacgtgttcccgaggaagtctagtctgtggatacgaatcaaaaggatcaagagacccgaatctgtagttagttaaagtgccagatccatctagagcgcttgttgatgtcccattctgccacccggaagttgccggcccggtcgagggttcgtttgcataggcgcactcgacttggcgtttgacgcagcgggaacagcgcggtgtacgaagatcgcagctggactttgatttggcacacgcgtcacaggaccggcggagagattggcgcattctgaaaagatatattgtgcatccaaagggggcctgtgttcgctctaggaatagctcaagctgggccctcacaccgcttttgatctcacgattcgaatcagagttggaacggcgcaaacgtagcttgacaaaggtcggctcaatgttgaagtttccaggcgattattccgttatatgtgggacctcaggttcaggtcccgagtgcgaatcgaaaaaggactagaccccgctctacccctgcttggcatcggagtctagtcctaattgggtaatttgcataatctgtggataactatctgggcccacaagtatatcatgccattcctaagcaacactgccgtacttgttaggtgttctctgtcctttcagaagaagagccagtttgtcaacttgcccctatcatctaccatcatggactcgaatatggcttttgagatggccaacacctcaatcgcccagaatgagctgccgcagatatggccttccaaccaacctcagtcccaaagctacctgatgacctccttgatgaggttgtcagtttggcaatatgcagtgacattcctaatcgccgtattagtctatgatcaaggtaggctaagcctttgagactataagaactcgctgatgccgtctctagtgatgtatatcaaacggaaaggctctatagctggacctccactcaagattccgctcatgggcccctttatacaagctctgcatccgaagtttgaagggtatcttgcgcagtgggcaagtggaccactcagctgcgtatctgtcttccacaagtgagtgctcacgtcttcgtctcatcgaactttatcaaaccaatcaagctgtccaaactaacgcaatttattcagatttgtcgttctagcctccgatagagacatagcccacaaagtgttcaagtcgcccacatacgccgagccatgtatagtgccgatcgcaaaggatatcctaggccataaagcatgggtctttcttcagggtagagatcacaccgagtaccgcagggggttgacgcccctattcaccaatagggctatggctacatatctgccggtgcaagagaaggtgctaggcgattattttgacaaatttgtcgccgctagcaaggcgaatcaaggaaagcccaaggaattcatgaccatgtttcgcgagatcaactgtgcactttcttgccgcacttttttcggtgattatatctcccaggccgcggtcaagaagattgcagacgatttctaccttgccacagccgccctggagttagtgaacgtgcctctgtcgatgtacattccgttcaccaagccctggctcgggaagcggacagccgacgctgtccatgccgaattttcaaaatgcgcggctgcatgcaaagcaaacatggcgacaggcgcgacgcctacgtgcatcgtagaccactgggtgctccatatgatggaatccaagcgataccacgaaagaatcgccgcgggggaaacggacgccgagaagccgacgaacatgatccgcgagttcacgaatgaggaaatcggagagaccttgttcacattcctctttgcgtctcaggatgcgtcgagcagtgccacgacttggattttccaaatcctggcccagcggccggacgtgcttgataaattgcgtcaagaaaatctggacgctcgcggtggtgataagaacaagtctttcgatcttcccatgctcgagtcgctcacctacaccaacgcagtcattaaggagcttctgcgtcaccgtccacccgttatcatggttccatacctcgcgacgaagaactttcctgtcacgcccaattataccgttcccaagggcgcgatgatcatcccatcctgttatccagctttacatgatccgaatgtttaccctaatcccgataacttcgatcccgagcgttggatatccggggatgccgagtccaaaactaagaattggctagtattcggtgctggaccacacgattgcctcgccaaaaaatacgtgccgttgtcaatggctggtatgatcggaaaagcggcgctggaacttgactggaagcatcatgccacagagagatcagaggagattcgagtttttgccaccctgtttccaatggttagtactgctattgatccatctcaaggaccattccgcccgtatcttgtgctgacatttgacataggacggatgcccgctggtattcacaaaacgttcatagaggcgttgcttgcatttcctgggatggagttgagtttctgcgtcctacgctctttcgcagtggaatggtgccattcgtgaggacgtttctaggaccgtcgacctgtaaagtcgtgtttatcatgttcgtatatttgtctttcttgggccatcgtacaaatacatatttcgcataattccaaaatgtacaaaagcttctcgacttaccctgttatggattcccttccttcgagaccaggtggaggatctttttgacaagctcctgagtcccataaggtttatggatgatatcatccattccagcactgagcatttccttctgttgttcgtctctagcattcgctgtgactcccagaatgggtacatgttctccactttccttttcaatgtcacgaattgctttagtggcgcggttgccatccatcaccggcatctgctggtccatgagaatgcagtcaaatgagtgttttttattcgcatccacagcctcttccccgttgctcgcttcaactatgttaaagcccagtgtattcaacctgcgcgagataatccgtctgttgataatgttatcctcagccaagagaatacgctggccgtcgcctgttagtttctcgtgatcataacgtgatggaggcttttgaccctttctttcgacctgctcgttctctacctcgtgggctatactttgagtccgaagtgtgtctgcgtcctttgggccgcctggctgtgcctcagagatgctatcttcaggggggtttgccggcatctgggggttggctgtcgtttcatcgacaccgcgcattttatttcccattgcctggatatcaacacagagcttatcgattgcggaaacctcgacactatcatcttcttcgccagcttcgttggttgttctgcgtactttgaaaaagaacccgaaggtacttccgtgggatttcttggagctcacaccaatctcacccccatgtaggtggcagagcttcctgcacacattcagcccaaggccagagccaccgtaaatgctctcggttttcggggtagcttggttgaaacgttcgaagaggcgtttctgggcttgcccagtcacgccaatacccgagtctttgacggcgaccatgatatatgcaacttcaccacttccccattcggaattgttggtcgcatcttggcggagctctgattcacctgaatcgaagaagacaatatttggcgggtacgaagttggacgttcgatcgaagcagctatcgagactcggatcgatcgctcaccctccgattgcgcggtgaatttgatagcattcgagagtatgttgatgagaacttggcccattcgatctaggtctgccataacccaatcaatgccgcatttggcatatgtagaatcggtcttgtattcgaagtgtattctgtgctttcggagttctggtcggaatatcgacatcggaatagtgaggtgtcgctgtggctggacctttcgtggcgatagtggcagcatcgacgcgtcaagttttgaaaatgtgagaacgtcattgacgattttcttttgatgcctgatgcaaagactaattgtctctgttgcctcagtgatgtccatgactgagatatcacccgggttcttgttatagattgcctcttgaatatcctccgtgcaatgtactatcgcagatagaggattgcgaatttcgtggctgatcatatcgataaatcgctcttgttgcttcttgcgttcctgtgcctcttcggcagcgtgcttttgtaggagctctgcccttttctctggggtgatgtctgcgactgtacagatgaacacgccatcgtcgccaagcccaaagcattgtacatccttatcgtccaaccggtccaaagtcatgacacaccaaaccgagtccgggtcgcgcgtgtggtattctagacgcagcggtcgtttggaggttgcaacctcccgatacccagtggacacccggtcgtagtcgtcaggatggacggagcgtaaccaacactcagagaagttgatgctggggtgtggaatgagttcacggaaccgtcgattcacggagatcagttcgtatcggtgggtgaggatagcgacgccgttcggtagaatgtcggccagctgttgcgctgagacattctgattgaaagagaaagtcatctatttcttcgcgccgaatcgcgcttcttccaatcccaatggaagatatgtcagaggctgatagaaaatgctcgatgactgctcaattatgtggtacctgcaaaagattcgggtaggcgcatggcgggtgaggctgaactgcgatttcgtcgatcttccgtctgtagattggttgtttctgtaagccagcaagccaacatatactggcttatatgagatcccttcaaatacggaagggtatgacgatttatagtgtcgtacgtcattgtccctcttcggtctacttctaatgtgggggaaagtatttcaaacgttgtgattggcagaagtgaaagtgattccactgaagtgacaccccctggatgcttggcacgtgccctgcatgctgacgtcatttaaacttcaatagttaactaaccgagccctagaaagtagttatctggctttcataagctctgcttttttcttttttatgtgggattaatgcataataatggcatgtgattttctgctcatgattttggaatatgaattatgcacagtccctattcaggttgactgcgagacatctcataattctaggaacgcgagggtacgaagaagattgaagggttgttacaaagccgggtctttgtcgtgatgcaaaaccattgaatagaatataattccagcctagtgtccaaaataaggtatgaaaaaaaaggcgaaatgtgggtgttttgagagcgccccgaggtgtaagagttatatgtcaaatgcagaaccgcgaatactataacattctattcttgcaccatgaaggctctccaacttagaatctcgtaaagcaggctatgtggggaaggaaccatgtgttgaatcgagctgttgactagggaacaaaggcattcatccacatcgggcagtaaagctaccgcgacatacatacatagataatcatgcccaatcatcaatggtcatgctgatcatgttggtcagagcttttgcttgaccagcgatcagcttggcaaagcaggagaggatgtccctattgctcacgatcggcttggcaaaagtgatccgagtgttggaggggtagttacggagtacttcgcactccgttggtaggttggaggggtggctcctttacataccatatatcaattattggccagtttgacgaattcagcaaatagaaaactttatccacagccacagtatagaaggagtgaggactgcgctcttttattagagagcgtactccgtatgcataacggagtacgaaatgcagaaactgcaaaaagcacaaatgggaagattttgaaattttcgacagtggagaatggttccccactcggagtcagaggtctagaagaccctgtgggtgatgaacgtgctgtcgcggaggaaaaattagcgtggccaatctcaatttgactacggagtagatacccgcaatggtagaaatgtaacatatttcctacaaataatacactaagtaatagctggatttatctcttttagccaggctcatatatttttagataatgccggccttggaagtagccctgaaaatatcaaagttcgctaacgagccctatcgggatcccgtgggccttagcgctcggcccgataacgtttaagtttctttttttttaagattaaaggtttcaagctgatagccactttcaacacgccattgatgcgttggctctacagaccgtgagggaaatggaatggtcacacggcatatgcattgcgttatcaaagccacattttaatcataatagtcgtacactatctcgcatgtgcgagtgatagggccagttattcttcctctccacacctcgtgggtcttcctatcttaaagaggtaacccgagagaacacgctccattctaagatcttacttgaaaaggtaatccgaagggcctcactccactttttaaactggatcgattgaagattttgatttttagtttgatagtaaatcctatattagtatgaaagtaggtgccagtactaccctcgctattcgtttccatcttcattccatcttcgcaatcacaatgggcattgttgactatctcacccaaccgcgtgtccatcaggtacatggtggtgatgaaacacccaccacggaagtcccaaaagtaatcgagcccaatattatctctagtccagacttttcaggcgctgttacacctgcgcacattctcccttccccagctggtagcgaggatcctcttattttcgagaagatcccgcatcagtttggccgtctgggttcttggagagggtgtttgattttgtttgttacctccggctctcagtttctcgacaatgtcttcatgacaagcgccaacattgccctgtcggcaattcagcaggatttcggcgtgtctagtactgatttgcaatggatgatctctgcatacaccttgtcgtttggtggcttccttttgttggccggtgctttgtctgatcggtatgacttcctcttattgtctctaaacttgacatcatgctaacctgcacagttatggacgaaagaagatactctgtctgggtcttgcctggctttctgtgtggaccctggctattggatttgggcagtcgtttattcaacttacggtgttccgtggcatccaaggaattggagctgcgatgactgtgccatccgccattgggatcatcagctcctactttagtggggttgatcgcacccgagcactatcaatctatggagcttcagggaccctagggttctgtaccggtcttatatttggcggtttcttgacctcttcgttgggctggagatatatcttctatctgattgtcatcatcactggatccttgggaatcatgggctttatcgtcctcccaagcgacgttgcttccgaaaagaagcaagaaagaatggactacatcggtgcagtgatatctacagctggcctgatcctgctccagttcgtcttgtccagtggtggaacctacgggtgggaccagccgttcattatcgtgctgctgatcttggcggttggtcttctcgttggcttcgcaatccttgagaaatacgtcagcaacccaatcatgccgctttctttgtggaagattcgcaatttcgccggtctttgggttattggttttagtaagttgcctgtttttcggattcgtgcttcggacaaggctaattataaatagctggatacggcacctaccaaaacgttattttctatatcgtccttatggcacagaaagtggacaaactttctgctggtgacaccgcccttcgcttcttgcctatgggagccattggcttcattgcttcccttggaacaggaaaactccttgaatacatgaatggaaaacacctcctcattgtcggactagttctggctgtggtcgcccccatctcgagtgctttgacttccaaccccgaagcaggcttgtatgtatcgctatttctttcttggataaaactatactaactctcacagttggctcaacgttcttcccacatcccttatcagtatctcatccgtatcttttgtcttcgtcacgacgagcactgtggtactcacaagtgtaccggttgaagtcaagagtcttgctggcggaatggtgagtttttgttccctgcattccaaccgtttacactaacatcttaactagcttaacactgcattccaaattggatctggtgttgcgttggctatctcggcagctgttaccgatgccgtcgacatccagcaaggacacagtctcgcagaccagtatgctaccggcctttggtgctcggtcggtctagctgggcttggactgatagttggtgttctggctgttcgacacaaaggcattggaccgaaagatagattgggcgcaggcccagttgctatgtaactccgtgtgatgactttttctcggcttttcttatatagatgataggtagactttttctttaatcatgatggatatagcgtttagttagtatgacgagggaaatgggataaatctataatagttggcgtttgttcacaatatcaaaagttttcacacttaggtagttctcagtaccgaggagcgaaccaaatacgagggaatagcaaatgtcacggctcgtacccctctgagctttcagacgtaccttcctaatcgggtaactaccgctttgatattaaggttgcctcacacctacaccgccttccaattttatgtaccatttttgtatgtcaaactccccatacaacagtggcaagacagtaggaacctgcaatttgtatgtaaattactgacagaattaagtcacttttttcatattaaccactttatcgtcaagtgcttcatcgttaaggggctaaatcctatacaaagtgggtagaatatacgcttttccgatcaaaatgcaatttcttttcctatgtaaaccagaagtgggcagtactttttgattgtatcgaattaggaagacggtaaacaaaatttagccagggtcgtatcaatcccttcctcaaccgttgtgccagatgtgccctcatcttttgtccgatggaacggattcgtcaacaacacttcggaggcgcttaagtagtcttggcctgcaagtaatataggtaacaaattaacacaagtcaattgtaaatagccttcgaaccttggaagctacaatttaaggccttataataaggcaacgaacgcctcgaactcacatagtcacgtgtataccaggtcggccgcatttggaccaggtcgcgatgcattcatagcaagctgttctcggccggcattcgaggaatgtaagagaaaaaaaattttaccgcaatgtaattttgggttgccttggactttagtcctcccaaggtggtgaacgacttgattagcatcaatcctcattgttgttagcgctgctcaccatgatcgccaggagaaaggtccttcaaatggccgcaatggcggccattacaacttacatcctctgcacggtatttgtccgaagctttggagatagagaatggcccacctcgtcttccaaactctctcagaactccatgggcgataatgttttcgaacacatacgaaacagcactcttggagttagttcttgcctaccgtctgacggaattcattgctgacttgaatattaatttccagtttgagcatatctatgcgatcagtatgaaagagcggaccgacaagcgcgatttcctcacactagcagcctcgatatcggggttcaaggtggaatggctcgagggagtgcgacccgatgatctacatcctaaggccatgcctgacgtatgctctccagttcaataaaccccagacaatattctcattctttctcagggactcgagacctcacccgtgaagctcaccgctgtggcatgttggcgtgcgcacatgaatgcattggtcaagtacagtcacaacttattctcatttttcagaggctatgctgacgattggacatttaaaaaatagtgtgataagcaatgactactcaaccgctttgattttggaggatgacgcagactgggacgtgagtctcaagtcccagctcggtgaatttgcgcgcgggctgcacgccttgaaagggaccaatcaggtatccaaagaagctccttatggaacagattgggatctcctttggatcggcggatgtgcctcgggcccgaacgccaacgaaacaagcttctacgctatacccatggaccccacagttccgagggtccaccaccgagccacctggggcggacccaccgaaaactggaagcaacaatatccagaattggccgaggactcgacgcgattcatctatcgggctgaaatgggctgctgcatgtttggatatgcagttacaaccaagggcgctaggaacattctttccgctctttccattgatcatttggataagccggtagatgatgccctcagtgaattgtgcgcgggtgctaatgggcgccgcaagattgaatgctgggctccgtttcccaatttgattggtacgtatagaaaggctggatcggctgcccgggattcagatatcgagagcaacaacgcggctgaattccacgaagagctggcctggaatatggtatacagcaccaggcgtaatatccaccaattagttgctagtgaggaaattgtttactcacaatggaaggatgaagatgtgccatggtcgagtaaagagattaagcacaaggagtttgtttatcctggtggatatcttgtcaattaatcttagctcaaatttccgaatgctagttacaattctaccgcaaacattttcgcacaacccacacccaaatatacatctccgtccggagaatttcgcggagggactgtatatatacctcggcattatacctttgttctttcctagggttaaaccttgttaaagcttgatagtgagagtgttggatcaaatttggtttgttagatcttggctttgagttatttaaaacccccttgcttcgtaaaggagttgcggcaaaaattgtatagtttcgattttcataaacgaatgagaggccacggtactgtatagtaattgtagccaattgtgtagtatcattccatacggaattcctcagcccttggcatttgggattaagtttcgggcttttatgctctatctctttctcataggcagagcttaggaaattggcttagggtcggcccgagtgggtttccatcggaatattattgtgagggttaattatcttattgatatcttatttatgtgaataccccaagtggacttgcaatatatgttctccatgagtgatactcaacagctaattgtagcttcaagtgcaacttgcgaatcaatgaccatggactctgtacggtatagctcatcaaaaaatattcagcgtgttgagttggagatgcctagacactcaactcatgggggagacttccccttgcgtcggctcttaggtaccatttacgccagactttggggtgtcttcagcaatcctactatggctttcacctctcctattactctccctttctgtgcattcttgagccctgtcacaagggccttccccgttatgtcttcctctcctcttccaaatatcgtcggcctggccactagaagcccttggctctagagccagccggaagaatgagtccaatagccttgcatgttctcttctagatcatgtggcttaaatgtcctaattgggctcagtggcaatgagaagataatgcaccaaagaatggaatgcctagagcgtgatactaaggagccaaaataagcgggcctcgactgtcctcgttttccttaaatctcgaggatttcaccgagttgacagcggctgatatatccatctgacttgtacagaaatcttcgacgatccgttgatcacgatcctaatcccgccgatccattataactatacagtcctacacatgccacgattccttggccttcggggcaatagcctcaatatagctgccatttttggggtgctcatgccgggaatcctcacaataggctacaatgcatcactgctcgggggtgtgttgacactgaagaacttcgaagaacaattccccgaaatcaacattgccgctgctgttgataaaccacatgcgtcaacaatccaaggcattgttgtagcctcttacacaataggaggcttcttcgggactctctcctgtatatggctaggtgacagatttggccgccgacgcacgataatggcaggatcagtcgtccaagtcgttggagctgttttgatggcttgttcaggctctctcattcaactcatcacgtctcggatcatcctcggtgtaggcactggtgttctactggccacaatccctctttggcaatcggagatctcgcctgccaacaaacgtggtgctcacgtcggcatgaaggggatattcagcggttttgggtgtgccctggccctttttctcgactttggaatgtcattcactcaaggcagtgttgcctggagatttcctttcgcttttgtggtgctactttccatcgctgttctagtgttcatctacctgttacctgaatctcctcggtggcttatccgacaaggccgactatccgaagctagtgaagtcctggcagctctcgaagacacatgtgtcgacgatcaagccgtggaagcaaaaatcaaagaagtccaaatatcactggacttgtttgaggaaaagtcactggggcaaatattccacatgggccctcaaagaacattccaccgagctatgattgctgctttggcaatgttgttcttgcaactcaccggctctacggtcatcaccttttacagtacgtatcccgaattatctatcgccatttatacaatatattgacccattctgcacattttcagcaaccgcaatcttcgaaaacaatctttccctcgataactcaacatccacggtcctggcagcggtctaccagctagttggccccatgggaggagccttctgcgttttcaaaattgacagactcggccgccgtgtgttgcttttaggcagtgcaatcggaaacgttgtctgtctggctttagtagctggcctcggaacccaagccgataaccctctcgccatgcgcggtgctgttttcttcatttttctgtttcatttcagctatatcatcggatttggcgcaataccatatctctacgccgcggagattgcgcctttgcatctacgcacaactatcaacagctttagcatcagcatatcctgggcggttagcatcttactcactgtcgtcactcccattgcattcaacagtatgggacagacatactttgtcattttcgcgggctgcaatgcaatgatgatacctgttatctattacctgtttcctgagaccgccgggcgcagtctggaggaaatggataggatcttcgctctttcgcgacgtcctttggatgctgtcaaggttgctcggcttcttcaacagggacaatcatttgacttgtcgcttgaaaaggaacttgactcaagcttcaagtgcccggagcttcagcttcgcgaggtatattcggcttgatatttacattcttatgactaagtccaacatttctattcgcgggaaataatagtctacacatggaaagcctcaaggaagcttcaaggtcctatgattcctccgcccagatgccattattttacctggactgataccagacgggagaggtgttaagtcaaagaagataacaaatatacgggtatgtacatactgattaccgagtacgccagtagatgtgtagacgaacatgcatgaagaccaaaacgtaacaacctggaaaactttgaataacaacaaatcaaatctcgggtcagaaatcacaagcaatagatgacagatacaggtaagaatttccatcatgttttgcccctttttttgggttcctttttggcttctttctttgctttgatctctggcttggtcttttcagcagctttgatattttcagcttgcatcttttcttcagcttgaatcttttcttcagccttaatcttctcagcttggatctcttcttcagcttgggccttttcttcagccttgatcttttcggcttggatcttttcttcaatttggatctcgtctctaatctctctttcggctcgcaaggtgattgccaatagaatcgcccctatctccttcatgtcggattttttcgttatatcccatggaccgtactggttcatgatcaagaacgacgaagtgtcatccggatatgcagctttcttatcgcttagatattcgagatactcttcctcatacttcgcaaccgtcacccatagctcatgcctgtcttgcgctatgtgtaagcgcctattaatatgttagcatattcgtagttgacccaagaaaggataaatacatacaggttgttggtacgctgggccaagtcgtcatcgcttttgatccaagcgaccatttgggcgctctcctgcatccgaataggtaccatatttagctttcttgtgacgggtttcacctcaatgatcgctctggtcttcccgccagggctatcgagatagccatccgtccttgcttcaaactgtgcgttttcaaaggtagcgataaatggctttctgtgcaaggtccaattcgagtagaaatcaaagtgcatggtaagagcattgagaaatacgatgagcgccgtattgacaatttgttcatctctcgtggggggatataaaattctgtccatttcgcgtgaggttgtgtttggcgggctggggtcagaagtagggcttgagccagggctctcatcatcttccggtttaaagatccgactatgaaatgggggcgaggtcttattatcgaagtcataagatatgtctccagatggcttgcgcgattctcttgatggagtctgaggatcctccaaagtcattcctttcattcctctaactagcggaggattcgtttttgcacgggttcgggacgcgataggcgtgtcaaatgtttcagggtcggcttggggtttggtcttttcaacctcctgatggtagtatttgacaatggcaaagtttccctccggtcttgctcttgagggctctcctgagcgctctgttatgtgcggttctgggatcccaagaccatcacagaatgtagaccacgactgataagagcgaagctttttctcggcctctcttatccaatatttgatgtccggtacattggttatgtttcttttgtgcgtcttccatatcactcggaggagtaagaattggtcgaatcccattttggaagcagaagcaagctctttgtcgtgaagttttgctttcttaaggtcacgagaggttaccttgtcgcaccactcctgaaaggttttgggtatttcatccctctcggaagcaagcattgtgttattgaagagaattcaaacagataggcaatattttctagaatgaatgttgtcactgcgtaggaatgatttacaaaatggggataacaatgctctttttatgctgggggggctccttcaattgagaatcacatgctttagtaaggctaattattggtgataatttgatttctaattattaggtatggtagatttttctttcctttgtctttttgtggcgaagcatgcatgtagggcgagtaatggttggatgaggagcaattagttgtgatagtggctgttttggtcatccgagcgatgcatggtatctttagtatacgaagtcgacagttggccattggttaagagagggtctttgttcccaatgaggcaggagctgtagacactaagattagaatagaaggctgctgctgcttatgccgtgtcgttcggtagtctgttcggtgatcttcttgggtatctcctttttaggtacacggaaaaggcgggaaagggtttaaattatagaaacgacctttctgtgtagttataaaagttagattagaatgaacttgaccctttccatgtccgagacaaagaaagtgaagttggtacgttggtacgttggccctggtcttggcgctttggtcgctcggcaactcgcctcatcacatttccccccatcagtgaactctccgccttttcttctctcacctcccactacaacatattgattgtagttactcctatccaagctatacatcatcttcaaatccctcatacgaaacatgacttccgtggaaacacgtgatcatcagctcgaccgctggcttctgatgaaaatcgagcatgcaatcgagaaccttgaggagcataagctcaacaacacagaacttaagaaatggaacattcgcttctccagcatgactctcgatcagaactcagacctcaagccccgcttcttcgcaccgaaacctaacctcccgctaccaaacgatgagatactcgatgaggccgctgaacctgatagtggtgatgatgactattatgcggctgcatacggcatgaatactttcttagattcttatgccttcagccaagtaggcctctggaatgacgggccgtggcgttcgatggagtaagtctaccgctatttggaaattagagttatgtcgctctgtctatttatgatatctaacgctagtcaatagctgtggtcgatacagtacttataagagcctttggttctatggtactccatcacttggcccgtctcccgcatttggcgctttaacaatgatagatagttctgggaaagaatatccacattttaaagcagttatatataccgacatggaggcggatgacaaaacttgtttccgttcagaggtcttgatcagccttcgcctaatgttggcccaattgagaaaggtgcgcctgatgcaccataagatcgcaccggtaattatcgattcttccctttctcctattcctttattctatctttcggcgttactaactaattattctataggttttgcttatctcgttaacggggaagtatgtacgggtattagagtcctattttgatggcgaattgcttcaaattcgctctacctgtctgtacaaattctccgaccgtgactcgatatcgacattgtacatgatgctcgccgggtatatgctcggccctcccatcggagatacctcttctttcccttgagttagtttggatcgggcaaggtgtcacggcttggagtttggttgtatgttattggatattgaaattggtgaagtttgtctttggcgctactgccgcatttcatgcagtgatgtgcttggtacttttcataaaacaggttgataagttgaaactctatggcagatctcatttttaagatgttgcaccgagtaaacccttacattacccacgatcctctaatatgtttgaattggatctcatggtcagcgcatataaagttcggcttcccacatacttctgtctttccgcttggcgtatcatgacggcaggatgagtggagtagtggagtagtggaggttatcagtgtgatagtaatccaaaagtgggggttcgatgatttatgatattcgagagctcaaggatgatatattctgtactgtcaatggctgaaatttattaatttccaagtttccaacagactctcaattacatcagagtctcgacatagcgatatacaaaaatgaaggatgggtatttgctatagcgattgaagccagctatgtatatatccacataacagcgtacataatagagcgtgccgttcaataggcatcatcgatatgcacatgggataattcgtagttatataattgactactttgtaagattccgacaaagatgcatgtgcccgcatctacagggaaacctaagaccaacgtcttctccaagagtgggatacacactatcttcattcttctttgctccatctcgcctactgaaactccattttatcaatcgatcatgcctttgcccgagtcctgtattgggaaacgaaggcgaaatagaaacgcctcaggcaaaccaaaagcaagcaaagcgcggtcctgcgaggcttgtcggcgcttgaaaacgcgatgcgaaaccggcaactcggaccgatgtcatcgttgtgatgttctcaggtagggaaccaggtttgataatgtgggttaccaagctcttacatctaactatcttcagggttaggtgctctttccaggccatttcccgcagccacccggaactgatgctggaggcggaggtggactctgcgacaagcggcgacgactaccattcgcggtatgccctcctcccgtgctgggctttttaagacttggtcgatgtactgatgaacaataggctttgtgcggtggaaaacaccttgagtcaacttcaagcatcactatctgtccacagtgatgctgactgccggaatagaccaggggtaaattccagttacctaaagtatatactggcaatacatttaattgaatactctaggctccatcaaccattgaacgaactgcacgcgatgcacccatgaatcttatccaagagatccgacagaatatcacattacatgaacaaccatcgaccagcgatgatagcactgaagatattatcatcaacggtatagtttccgaggaacttgctatcgtgcttctgaaagggtgagcatgcgggacgttctcgtagaacatatcccaatgttaactttccagattctcgaaattatccaagcgctggttattcatgagtacagaccccgtccagctacgcaccaaatcgccgctcctgtttggtacctgtattttggcaggtctccatatcaccccctccttgtatgggtcatcaacacatcaagctttgtatcgccatattcacggactgctgggccaggcacatctttcttccactgcctcgctcgacacaatacaatctatgttgattttctccatgtgggacctgcgcccaactttgggtcctgatcatggtacctcgtggcttctcagtggcacggcggctatgcgggtgatcatgactacttcgtttgggcagcttccaaagacaagcgacgccgatagaagcgaacgagccagagcacaagaaataatgcgcacgtggaacttgatttgcctctgtcagttacagtgcgttacaatgaccaagtctcgatccttccaatgtctatatcatctaacactaatcttagattttccgtgggctctggtcgtccaccgattatatccagccagtactttgacgaatgtaccaacgttctcgattttccgtcatacaatgcacgcgacgagcttgtattggctggagtcaggttataccgactcctttgggaaatcctaagctcaaacgtgatacaaaggggaagtgctgtttggcctgaaatcgacaacttgcgaaagacccaggagaatatttacagtgagcaagaaatatacaatcgccgcattgaataagcactaattcctattttatagagcttgattcctcgcaaccattacggtttgcatacgcctgcacgtacctgattctggcacgtcgcacactccaacatacgagcgaaactcaacctgaaggaatgaccaactccaggataacacaagagggaccaacactcccgttaattcggttcgcgattagccagtcgcttcaactcttgaatttatttgtctccatgtcggatttgaccacttatatccatcctgcttacgagaatgtgctttgttcctttgcaatggtgacactagctgagtttgtggtccatttagaggacgtgggaagtataatttttctcatggaacaagccgtctctcatattcaatgtggaggcaaagctgagccggtgagccggtggtctctgaacatcatgaagcaacatgtcgcagataggattgagcaagaagattgtgtcacttcgacgggagagaatggcacagggatttatatgccgcagtcagttcaaaatgctactgagccctgggtttgcaacgaatggggcatcgagcaggagttcccatcactcgaagacatgttcttcagtaatgtgatttgaactgaggaataaataagggattgttaatttatcctcccgcgcctgagtcttcaggtgcacatccctgttttacctgacgcctagttactttcatctactgcgctctataccgccttcgaattttatacaccgctttcgtgacaatagacctacaatttgtacggcgtatgtaaattaacaaagttaagtcacttcaactgcactaactgcttcatccatcaaggagctgagtcctatagtaatcgggtagaatatacgattttttccgatcaaaatgcacgtttcttcactatgtaaaccagaagttggcagaatatatggtcttacctaatatggaaggcggtactgaaaactcaggcggtcaaattagcaatccccaataaatattggctcccccattgtgaacatcaaccatttactcatatcagttccatatatacattcaaaatgcggaaatcaactgcgctctctcaatctgagacctgcctggcactccttgggctttttcgagaatccttcgtgtgattccatgattggctggtacaacgcgaactcatatcgatgaaacaaagttccaataattagctgcagctccatgatggcgacgttctgtccgacacatgcccgggggccatatgagaatgggttgaaagcagttttctgtcgggcagtcaggttcaaccagcggtcaggcttgaattcctcgacatcgtctccccaaatatccttcatatgatggatagtataggagggcaccgaaagtactgttccaggagggaagtggaacccatcaaaatcgacacccgggctatgatcggcgaccaaacgtggcaggccaatagccgaggtagaatgaagtcgcatcgcttcatcaatgcatcttcgcaggaacgggagatccttgatctgagaataagatgcgatctttgcttcggggtctattgcgcggtccagctcttcttgtagtcggggaactatcgtgcccggtgcactgcgttctccatgcaggatccagtaaaagatgccgcacgccgtgttagatattgtgtcagagccagcgataagctgcgtcagagcctctgctatcagctcatcccgctccattggcattccattcgcatcttttgcttgtagcaagcgcgacagaatatcgttgcgcgagtcgaccattcccttctccgcggcatccagtcgtgatgcgacagcggcgacagcaatccccgtcaggttctccacggccgctacgcccttggtgaaaaatgggtctgggaggtaccgagcccatgggcgcagtgctggaagaaggcccaatgtcgaagatatctcgcctcgtctattcaacacgtcgactgccggggtgtatgaaatgggtcctccggtcacgagctgcgtttcggtctcgtctttgcccttgtttaccattccaaatggtgagccgaatgccagatctccgattatgtcgaaagcaaggtagctgaaccagggcattgcgttatatcgagcaaattccttcccattccgctgtggctgagaagccgcgatccggtccagctgggttgtccagcgctgtaggttttccgccataaatggctcaaactcagcgactgacctgggagagaaagcatgggatataatcttccgcttgcgtgtgtgttcggcgcggtcgcgaacattgaacatgcccggggttcgcgccacaaatgcttcataatagtgactaaaggtgtttcgttaacactagtaattttcaatatagggaagaaatgtgagttactccttgaggaagccatttccgtgcccgtaaacaatattcaatgcccgttcgtcggcgatagacacatggttgaaaccaatacggacgacattgccgtgttttcgatgcgccgcgtcgactgctgcatatttccggccatgtttggcacttaatccgacccatatgttgctaaatttagcaacaaaaggaccggggacttgacttaagtgtccatatgaaactaaataggggtatatgtagtagaccgcgaaccacacgggaatagccacggccatagcccatggcgagagcaaaagggatagtagagccatttgataaacagagatgaatgaattgatagactagagattatgccattctcttcctcttttttaaatggaatcagttgcactcgacatttcacatgttcgctatctgtccgacggagtacaaccaacaccgtcggagacgagagaaccgatatgcagaatcgatgtacaaggaccaaagaacctgcagatagataattgaccccgcaacattggaaaagtaaagatagagaattggaatgcagtttattggttaattttggacagctctgaggttgttcctcgaatgtccgcggtgataagcggccataacgcggcattttcatttcccgaaacctccgctctcacgggcttttccctgtcaaacgcttccaaacatattgaaattccccatggagtctcagtcccgttggcgtcgaaggccagctcggtcttgcattgagtgtctccgtcgcaaaatccgctgtggccgaatgacccctgtacgcgttgtgtctccgtccacgcacaatgtacctacaagctttatggcgatcaacacaagtcccccttgtagtctctagagagcacctcaagacaaccaacactgggtacttccgcaccttcaccgtgacatgctcaacccttcagagatgatcccccgtcatctagtagccagccattagagcctcgcaccactggggtagggacaccaacaccaacaggaacaccacattatagttcggcttttcctggtcaggttgatgaacacccaaggcaagcacaagccacaaactcagctattgcagatcttttgcaacgggtccagggcctggaacagtcggcacaaaagcctgtgcatggcttgtgttgctgctgtcggttctggaatcaccgtcgaatcccctgcttggccttgaactcccgtctcgcaagatctcagatattttggtgaccttgtatttgaaatccttcgagtcaacacaccgcatacttcatataccttccttttgggttgactaccagagatattggaatgatccgcagaatgcctcaaatgagctacgccttacagttcttctcattattgacatagggtcaagcctgcacaaggaggaaaatacagatatcggattccgaaaaatggttcatcgatgggtacatgctgcgcaagcatggctttctgggacactagaaaaagaccgactgagtgtttccgcgctgcaaattgactgtcacaatcgtcgagcgttttccttcccttcgcgcttcggggctccagattgatcttcgaagccatggaattgaagtcatgaagtgcatgggcaaacggcaagcattttttccagcaaacaattttataaaacccagtctaggcttcagtaccaagtacgagatcatgagaggcgatctgtgccgaatcgtctatggtctgagcaaaagccgggccaagtatatcttcggcacgtcaattgagagctacgaggaaaacgacaaggaaaagaccatcaacgtgcgatttgcaaatgccaccgaggacacattcgacctcgtaattggcgctgatggccaagggccacgcacacgaaagatgatgctcggaagagaagcccccgatgcattccgtcccctcaacggtcgctgcatcggatatttcacctttcctcaaccaatcaaagagggggaagggtatgtcgctaccatgtactcggcaccgggcggacgaggtatcatgcttcgaagacgcaatgcgcaagagatccaggcatacctcggcggccaaacgaattcagagaagctcaaggaacatttgcggggtgatgttgcggagcaaaaggaggcgttgaaggtgatacttcaaggggcggggtggagagcggacgagatcttgggatatctcaaagactccaaaaacttctactgtgaacgccttggtctggtcaagatgcctcattggtctcgcggtcgtgtcacgctcgtcggggacgctgcttattgtccgtcagtcatgacaggcatgggtaccacttctgggattgttggtgcctatgtcttggctggggagattggtcggcactgtggtgggccttctgaggagggtaatgattctcttatggctgcggttcaggcatatgaacagacattccgccctgttatcaaccaggtgcaggcaggtgttgccgaggatgaggggctttggcattgcacttggaaactatcttatgggagctgcttcccttttgagattggatgttctcagcaagttctctacggatcctgtcaaaaactggaaacttccgacatacaacgagttgctccgagattagacaacaccaactgtgcaactgtgcaactttgcagccttggaactatttctctgatatctacctgtatttttcctctcaatggcatggttatttgttttatttgcagtacatcagaccatggcttttctttacatataagcgaatctatagcctccaaattaatcatcagtggttcaaagtcagcctgctagagatcttgcaataactctccaatttaatcaactactcaagctattgattggcacacggtgaggagtccatgttttgtttttatttactatgtcggcctcaagcagccagtaacaatacgtttttcctatctgggctagcttggtctctgaaccctggaacctcggaacttaaagcagattacgtaattacgcggggcttgcccgccctacagggcttcatttgtacgagcgatgtgatgggctcctcaattacttgtgctccagttgtcgggatttggcatagattattgccaacacaccatcttcctgcacataaccataacagatcaagcacttgctcactcactatgccgagccagaatacaagctggagacaggaagaacactaaacaaacagatatcatatttgaacaaggtacagagaacccaatctcacctgaagaaaaaaatctcaccccataagcgacctgcagagcaggagatgttcttcacgagctaaactcccgaatcaattacgtacaatctcgggatttggaggtcgcaatttgcattagcagtcttgggagacagggtgcttatcctgtataagcctagcggatgtcattgtctcattgttcctgcggcttggcccgacacggcctacttagttggcgtacttttgcctgcagaatatattagaaccgtgtctagcgacaggaatcttgcaatcagtagtctctccccacgtctttgtcaatattattgctaacatggtttcgacttggctccactgcactccacatctcgacagacgatgtacccttcataagggtaggctgtcatgttgtcgagagggttgctccgctctggaggtccgaccgttcggttgattttaactcttttgatcttatctgatccgcctttcttcgtcttggtttttctttttctcgtggatgtttgtatttattaggctgcaatacacacacctacgccagtctgatatatacctcgccaaatcatggataaattacccaacgcaatggccaccgaagccctccccaaggatcaggacctggccgaccctgagctacaaggaatcttagaaggaaacgcccgattccgtcggttaggctggaagcggctcactgtcatttcgatagtcgaggccatcgccctaggaagcctagggctaccatctgcattcgccgccctcggcatggtcgcaggcgtgatcctaaccatcggactcggcttcgttgccatctacgcaggctacagcatcggcgaagtcaaactacgctatccacaagtcggtcactacgcagacgtcggccaactcctgctggggaacgtgggatcgaagatcttcgtgggcagcttcgttgctctgctcatcttcgtgattgggtcgcactgcttgaccggcgccatcgcattcgagactatcacgcaaagcagctcgtgctcgattatcttcagcgttgcatctgctgcaatcctgatgctgctcgctatcccgccgtcgtttgctgagattgcgattctggggtatattgactttgcgtcgattctcgtggctattggcgttacgatgattgcgactgggatccagagctcgaatggttccggtggctttgctgctgcggatgttttggcgtggtctgcttggccgaagccgggtcttactttctctgcggctatcgtggccactaataatattgtttttgcgtattcttttgctgggtgtttgccgtcgttcatggaggatatgcatacccctgaggattatgtcaagacgctgtggtggctaggcggtatccagattgttatctataccctgactgggtctatcatctatgcgtttgtcgggcagggcgtgcaatcgcctgcgttgctgtctgcgggcccgattgtctcgagggttgtctttggcatagcgcttccggttatcttcatttcggggtcgatcaatacgacagttgtttgtcgatatatccatggaaaggtgtaccgggactcggctgttcgctttgtcaatacttcgaaggggtggagcacgtggcttggtcttgtgttctgtgttaccatcctggcctggatcattgccgaggctatccccatcttttctgaattgctctctatcatttctgccttgtttgtgtctggtttgtcgttctatatcccaccaatcatgtggtatatgcttttgaaagagggggcatggtatgagaagcacaatttgaagcctgcgattttgaatggtgtggtattcctcgtgggcatgattatttttggatgtggtacatattctagcgtcgctgaactggtaagcccttttccttttaccatccgagcaagattactgactatgttttagattgataaattccggtcgggatcagtaagtaagccatttacctgctcttgaaatgtcgcaataacgcggtgatgtcccggcctgccgaaatctgtttatataaaagttccatgcaaatatatgactatcgttccatccatatacctacagcgatatctttctacttcatctaagtcttgtttgtgcgtagcgtcaaagaatagtagtttaaatatagctaaatacaacataaaaaacacaataaaaagtccatggtgtctaccgcgtttacttatacttacctcgtcccctcattgctcctttcaaccccatccatcggatctccaacccagtggttcccctcaaagaacgcctgtaaagcaccatcactatcacccaccagtccttcttcattaaacatctcagtatccaaaacgccaagcataggatcgccaacatcccccaggagttgttccccagcgggagcagatacaggtacaggtacagccgcagggacaggagcaggagcaagggcaagggtagggagagggacaggggcacgggtaggagcaggggagtagttagtatcagagaactcagggcccgccgaatcaatgtcatcgtccgattcacgagcagagtcagtgccagtcgcggacgtcacggccgtcttgcgtgttctcgttatccttcttttgcgggttactggggcattcgtcgcagcctcattttctgctccggtttccgcttcggtatttgctcctgcgcctgcttccgcctccgcctccgccctcttccgtttcgtcttggcgtgtctttcggccgcgtatcgggctacctgttcagaacggcggttatgagcaatcacattactacccattttctcagttggacgagctaaggctggctgtttaggggttagggcaccacctgtagaagaatagaaatattagcatgtgatctttcttccaatcaaaaaccaaaccaaactagaaggctaactaagccatacctttaataacaccagtccggataataatcgtcatattaggcctaggcaacggcgagcgcctatcaccccgaaacggatccggagacggattccgcaatctaggccaatactcgcgaatagtccgcacaatcgtagatgcgaaattcaacgcggccatccgcacctcgccaatctgtgggttagcaacgttcgcaggatcgatttggtctagggagagatggcttagccagattgtttccctgtctcgcagatagccttctcgcgtgaggttctgtttgaatagctcgaattggatgttggcgatgttgatccagtctccgtctgggcatgtgtcctgcgggtttactttgtcggttaggaagtcgcttactcgcattgtcagtggcatgtcggggtggtcggcgcgaattatctggacgtcgccgttggggactatgtatggccgaccgtagtcgaatttgttttgtcggtctgggtttctttgggcggaccttgctggctgttgcggttgctgctctgctggtggctgttctggttggggtgatgattgctgtgctagttgatgtgctagttctccttctagttgctcttctacctgctgttcagatacctcgatggaatgctgtacggacttggatactcccctctgcacgggctgtgctgcggtcttctctccccctgtctgttctgccagtggattctgccgtctgtcaaattccgtctgcaactcgtcttggatgcaattcaggtatttatacagcgctccgcatagaagagtgtggtccgttacgtgggctagagaagcggctggtaatctcggcagtcgcttgcgccattcaattagcattttatcgcgcgacgcactcgatcggaaaacgttgacgagggctcggccattgttcagagcgtcgagcgcgacgatgtcgtagacttcttgtgctagatcgtggaggagctgttggtcggtggggctgtatagtatgtcaagacgcttgaatacgtatttgtcgtcgaagttgtgtggccaacgactgagcggctgcggctgtggaggcattttgttagctttgaatgatgtattcgaatggtctggaatggagggtcatggaggattctgttcactatttaatactcgagaggctttgtgactgcattgtggccttggatctcgatattccaatatgcattgtatctgaaagagacaaaggaacaaagaagacgtgatagagactaaattaggtcaaagaatactctatcgaggtgaggtttcaaggtcaacactattattacgcaaataatgagatatctagtctcgatatttttagattgttagatctaactatgaggtattgtggcggccggggggggccttctccacccccccccnnnnnnnnnnnnnnnnnnnnnnnnnnnnnnnnnnnnnnnnnnnnnnnnnnnnnnnnnnnnnnnnnnnnnnnnnnnnnnnnnnnnnnnnnnnnnnnnnnnnnnnnnnnnnnnnnnnnnnnnttgggggcggctggtgggcccattcccaccccgccacgttcaggatggcgagatttgatcatttccaaactcgaatgattctagacccgagaatacagacagttacgattacagagagaggtttgaaagaaatgacgtggatatttgcattgataactccttataaaatatgaacacaaaattcataggtatgaccttccaggcgaccaatcgccagaatccatagaagaaacgaaatagcaattgctcacatacccttcctccgcgtattttcgtgattcatttttgaaattttcgtcaagcaagaaatcttacgaagagacgtaagccttgccagccaggttgagagtgctgccgctgagcaagtagttctcagcgcacatgaagtaagagtaacgagtgacagcagactgctgatccaaccaagggataacctcgttcaggaaagcagcagtagcagcgggatcggcggaaccattgacatcagcgttgagagcaaactcggtgatccagagctcggacaggttgttgctggaagcagcgctggcggcctgggtgacaaaggacttgaaatcgtcggcagtgtcaccgtaccagtgaacggccagaccggtgataccacagctggtgcagctaccgatgaaagactcaaaccagtcaagacccattccggcggtagtggaggaggtgacggcgggcgagatcagcttcgcctggccggaccacggggtgatgtaggtctggtagtagctggccgcatccgaggggctcatgttagcctgggaagtcatgtcgggttcgttgaatcccagaatgtaggtgctgccgctagacaaagcggtctggatggcggtcgcccagccgccgaacatattctggccccagagcatggggacgaattcgacgcctgaggggagcgagccagagagatcaccggcccagttgtaggcccacgagatggtgccagcattggccagagccgacacggtgctgacgtcgttgtaggcggcaccgcgcttgcccgaggagcgcttggcatgcatgggggcggccatggccgaagtggcgacgaggccggcggtgaaaagcttggtgaaagagaccattttgaaagtcaaagtatataagtcacaaaggagtggactagatggtaaaaaggagggaaaaagagagaaacctgttctcgaccttgaaaggaaagtgaggcttagaccgtgcacggcacaggaccagaagaccagaaaacaaatgaaggaagggtaggtggtgaagagaggagggaaagaaggagggaggcggagggtttaaatcccccagggccccagcaatgtgtcaaaccagcctaaccgctggaagatgttccagttccacggtggagtatgggaaatggccattggatgttggccggaggcgtctttggccagaccgtgggatacacggcctcattggcgctggggaatatccgtggaccgttgacagccattggaaccgtgggaatggccttctcctcttacattccttcacacgtgcatcgaagtatactctcccacggcgctaacagagattaattctttcgcttcttcggtatcaaaaaggcacacatcggatgcaactccacagccaagatcgctagtccactccacaatagcctaggccccgatcgggtttgttacatcggattttgtcattgccaagaaagagttcacgtcctggactctgttcctgcgtccgctttgtctgaaatgacaattggcttgcccctggcatcccatcgaagtatacaacggagacaaccgcgacaagggggattgcacgcccgacaacaacaaattgccctaaatcggacggtggagacagcaacgtaccacggttggcattgcatcatccaatggtttgtcatggattccaccgcgcggttccctggttctccgtcaggggagttgtcctgataggtccacccccgatacatcatcgtccgggtccttgggtgacctatcagatcactgtgcctattgaacacaaccctaggaacattgcactacggggtacatttaatttaaatcacttcggattgtaaaagtgtgagattcaatccgattcagtcctgtggtgcttcagtaaatatcattcacacgttacggaggattcaacacatccaggcgtcaactgaaactgacgaattatgacacactgtccagccgccacatcaacagttacggagtaaaatggatcggatcggccagtcataggaatcatagtcacctccctttcaccggtgcgttccttacttctagactgggggcgttgttctagggccagaagaaagagggggcgtctgaaaccaacccctcctcccctcttcccccctgccgatcggttgccgaaaaacggccatgacaagccttgccggactacacgccggtgtttcttctggtccatcttgggattggcgcccacatccaatgttcctcccgttctccaggcatgtcctaattttgtagtcggttttgcttctacttgcttcgtactacctctcataatttgctatgtatgttctcccttgggatcatgactggggatgctcttattcccggctctcctataggctgtggggatatactcggtacacaagtacatatactccgtacctggcacagatttacatgccaagccgatttgaattttcattcatatcagggatttccctgtggtcctaactctaaatctctcaatcattctttgaatttcattgtactcgtactccgtactcccccgggctaatagttgccactatgtacatagcgagaatcacaatgatatcagactgcagtcacctccggctggacatacctccgcacccaagtacgcatgcctgtatctcatgtcaaagaccaagactgtggttctcctcatctgaaacagacccaatcccaccgatctctttgtggtcccgtcaacgtggaccgagactctaattttcagctcttcagggcactttctcggactatgaattccggactatgtcctccgcacggcgtatttttatcataataatttctccgaaaaaaagaaaagaaaagaaaatatgcccgtgaggttgttctggccgtgttggcaaagcaatgtggcttgtctcaatagactcgcttctagcccggttcccactttccctgccgacgctctctgcccacgtcatcttactgcacagagggcttgggcttgggcttgggcttgctggctttgtacggagtacacatctaactacactctcggaaatgaacaaaggaggttcattaatcattacttaccaatctcgaatctcgttttggtctttgactcgagcccaaactgtcgtctcggcattctagctacttttgactagtgcccggactcaacaacgtggactatagaggaccatttttagattgtaacgcgtggtcttggtaggcactcatcgcactggccatatgtcggagtcgccggacagctcgatgacatgtttaggtagctatcgtcgctgatacgaagatgtctttaaagtatcgattattggtttcaggaagtgctgatcatgcatacctgtggttgatataacaagtctacctcgtgttctcatgggatttatcatttcactatcactatcttcggtttatcaaatatagaagcgacgcgatgcgagtctctatgttctcattatcaatggtgctggatatagcacatcatctgttgattttgggcaattatgcatactcgaatggcctctttatatcggcagtctcctcaaacacgaagctccatatgtattaggctttgttatggacctcattaactccagccagttgcctttatcatgtttggtacctgttacacgggtactcgaaagtgtataagcatttacggtggtgtatggaatttatgctaagacttctatgaaaattctgtgtagaccttcctgagattaagatcatcatcggaagacgaagtgctggagtaaatgtgatgagtatcatttataagtatcacatttcttctagcaacagctcacactcttcatcatgagagcaataaatttgaacatattctataattcctactttcttagagttactaaatgctgcagtctcagtggttattggtgacgaactatccacttgcacaacttacaagtgtatatcctcaatctagccacccctaactacctataactcaatataagcattcaacaagctaaaccatcatattgcacaagatctacagtccatttttacaaataaaatcccatccaacaactctcatctataccccatccaatcacaaatactgcccaaaacagcccaattaaagcaggcggtgaaccgcgatgatgtaaactatcccatcgcatcatcagaacagctccaaccttaatacctattccctcccacaccaatccaaaccggcccatacaacaatgctctcccgtacagctcctcgagctctgctcgcatccgtgcgcccatccatccgcacaccagcacccaccaccacttcagccatcctcccccgggcctacgccatccgccccagctccgccgcacagttcacccgctcattccagtcgtcactggcaaaccgcaaaggcatccacccagaatccgcaaacccgccagctccaaacccgcagccgggcgttgccggcgctgcttcgcatatcactgagccgtcgccgttgacgccagaggagtactacgagtactcggagcattatttcaatgtgctgcagagcgagctggagaggctgcaggaggaggggtcggatgttgaggctgagtacagtgtatgtttctcccggtctttttctgtgtttattttgtttttcccggtctttttattttccttgatacaaacagaccttgtgttggcatgctatataaaatataaaaatggaaaaaactagctaactctcttcctccaggccggtgttttgaacatctccgttcccgcaatcggcacctacgtactcaataaacaaccacccaacaagcagatctggctcagctcgcccatctccgggccgaagcggtacgactggattgtcgagggcgattatatgcatgagaagcaggagtcgcggcctttcgtcaacgggcagtggatctatctgcgtgacgggtctaatctgaccgagttgttgaactcagagttgaccttgagtttgcccaaggatgtctacagtcaggtcattgagtgagagagttgtcttgctgggctatcgattacctagaaagaagagattcttgtcgttccagttttatttgggatgttgttacatattgtagtttagtgtctatgttatgatgtggttgcattgagatctttacgtgctgttcagttcttaatttgctagatggaggtgaataaatgagttggggacatagttgtgagtatcatttgagctacctgcactgggtgggtatatagtggttgtgtgtagcgggaatcaatgctgaggtgggaaaagtcatctcatcgccaattgaacgggtgtagcaaagtgctgttctttctctttgaatgaacccgacatgtacatagccaaatacagtctcaacccgatgaatgaagcggtgtcttgcctctccaattgattgtccaatgtagaactacaccagagacaaaatcaacggagcccgagtcaacattgaatgtgttgagcgaggtacgatgggtaccccagtgcggtcacagagaccgatatcccccgggatacaccgagtcacttggcaagattggaagatgcatagataacatccgcagcagaacatcgagcatgttcgcgcgatccagtgttcaaagcgaagtccggtggctcaaagccacccagacccggcgagacacatcatgccgtccagacgagcattcgcagccgggtagtggaacagcaaaatatcccaacccctcaaaccacttccgccaaaataattgcaagtggcaacgagccgactcagcagcatggaccgtctcttcgtctgagatagacccgatcatttcaagggtattcgcaaaatctccttcatctcgcactcaagcctgaacagccaccccgctcgtactctgcgtctcggctttaggaagatcagactgtgcataccccgcagggcaataattagccaaccgaacaaaataaagcgacatatatctagcttatataatagggaaacacaccaagtcgaagataacccggatcatcagactgcaactcggacatacggcgatttcttcgccgtcgcgcaagtcgtcgattgcgatctcgaagcggtcgccacatgggcacggatatgtgtagatctggatattcgggtcgaaggtcatgtcttcgatctcgatctcgtcgtagatgttcagtccgtcgtcggccattttggaggattatcgcgtatgtgcaaggagagatgtggcgaatgagtggatagatcttgtgccgttgactctttcgggcagaaaaactttggcgcggtcatgtgatgcgcggggttaaggcagggtatccccgggtttaagacttggcgggggctgatgaatgaactgtgaactttcgtcttaactcaattgtgtatatactcggggggttgtgaatcgggattggatgcactggctcctgccattttgggcatgccatctccaaatatgcagcttcgatacccaaacaaatacagccttagtccagtcggtaggctgcacaatcacaaaggtcattacaggtgccaacaaaagaaatgatttgagctgaaagagatggccatgggttaggcaaggagcatgcatacccacctccatccaatcgtccgcctgaggatttgtctgctctatcaaacagacccctgcgatggttcttctggcttgtcaaatactaaattcaaacatagatgatgttgcagcatgtgacagcaagaatgccgcgatggagggtagccgggaaaacagccaggttgacgatggattaggacctcggtgtgttctctatggctgctggcaattgggcttggggctgtaaggaagaagtgagttaaaaccagcactgcatcaagccgtatcttcattataccatgtaccacctagtgtacagttgtagctcatttctctaatcgtgcaatttccatctttacttcttcaatctccctcgccaaaaccccatagcgacgagcaatatccgggaaagtcccttcatccgcatcgatatcaaccggatcagacacctcgacatcgccataatctctcaactcttgaatcgtcatcttccgacggtgctgcaggcgctccttcgtctgcctgagatgctgcctataccgagcaagagcagcgagtgtttccggcgtatacagcgtagccgcaatctccagttttgtaaccctgtcgaaatcattaaacaaactccaccagaaagacaacagcaagacttgaaagctggaaaggcagaacttactctaatttcccctccacgccttgcgccagcacagccaaatgctctgccttggctttcgtcgcgcgcgccagagccccatgcttcgcccgctccagggtcacaaccgtgcgctccaaaacccgcgcccgcgcagcaacaacctccgcagctgtagcagccatcttccgccgagcaaccggcagctcggacagctgtgtgtggcgcagcgcacgtacccgcgcctgcagctgtgacgagagcaatgggaccggcgccatcgacgtccggactcggcgatcgcgtgcccgggcacgtgcgatgtggttcgcgtgtgtggttggagcgtctgcgtcgggcgcggtggctggatctgtgtttacggctgatagagctcgtaggtcttgaacggcagatgagatgtttttggagagtggttggatgaaggctgggatgttggcgtagaaggcttcaatgtccggtgctaggagggtgagtacttcgtctggtttcttgagttcggtttctggctttggggtggtgggttcgattgcgctcgatggagtctctaggtagagggtgattatggccaggttatcgtggcactagatttggtatgtttgttagggatgtggtttcttcttggtgggggttgtactgacctccgccgggaggttggtgtctggggcgaaggccaattgccggagcatttgttccttgattcgctttttggcattttgagtctggcattgcttcagctcctaatgatagtgtcgtcagagctctgttcgtgcttaagtccgttaggtatgtgctgcatagcgcgtcgaccacttacttccaccacagctgtacgggctgggctcgcgctttgagcacgcgttgaggcatctgaattgaggagcgaggttgttagattctcatatagtcgtttaaattgaggattgtgctcaagaattgaggggtcacagggaggaagcatgttgatgttgcaaagaaactggccaagttcaccgccgaagaagacccgacgcgtcagcgccacatagacagtaaggaaagaaattcgcaatacaagatcgtacattcaactacatacctaatccatgttagatggtttaccattacaagtacatattcattttgcatttccgcgtttctttcataatcatacaagttgaagccaaagcttcggttcacctcttccaaccgcaacgtcgtcggggaaatagagcaacctcatccacctatcctggctgtgaaccgaaacgggaaaagcgtacactgaggcgtaggggaagggaaattcaaggggatgagtgaataaaatcctgttcggccaatcttgagcataaggttcgtcggtggcagagaaaccttgccgggtgcaggggtattcgagatcaaagtatgtacagacgttgctggcggggattgcgtagcgcattgcaagcagcccgtcaggatccagcggtgtgactgaaaaagaaagatgtagcgagaaattgttcagaaaggcactgagagaaaacgacgcttggaacgcgagggtggagggccatcccgtatggaaaaaattggcgggattgagtccgaagagtacatttactcctcctcgctctcttcttcagacgaatcagattcgtcatcgctgctttcgttgcgttcaaccgaggccactggatcaggagagtgagcgccaccctggaaacgagaaaggttgctctggagcatgttgatctgagcctcctgctcgaacttgctcattggcttgttcttcttgggcttgggaggtgccacactgctcgcaggaagatcgtcttcgtcttcatcatccatgagattcggcacgtgcttcttcacgaagttgagcaacttcagcaagacatcgttagggagctcgtcgatgtccaactcaatttcagcctcgtcggtaccctaaatctggattagaactggtctgtatgtggtgaacgtataagaatcttaccttaagttgaggaacattgttctggataatctggagggcttgctgcatccttttatcgggaagactactgataccgttcgagataatctgcttctcgttgtaggtgatagcgcgggttttgcctggttgagagatcttgctcttcttgtccctctttccagaactgatcttcttggaatccttcttcgcaagcttctttccaaccttcttggaggaaggaggtgtcttctttttcttattggtaatagcctcgacctggcgagacatctcggcaatttgcttctgaagcagcgtgagtttctcgtcatcttcctcgctctcttctgcatcctcgtcgctgtcttcatcggaagaatcagtgttctgctcggggtgtggttcatgcgcttcgaggtagtccgacttctgggcccactttgcgttgaagatttcctccgcacgctggccacagacgaaagtgggatcaccggggatattgaagcggtaacaattcttgaaaatgaggcggacatcattttcgaactccctggcattctcgtactggccggtcttaagtttggattgggcggtcgacagatccatcggcttcttgatgacgctgtggtatgtgggaatgttcaaagcaacggggtccacgggataatagaaaggcatcacccagctgtagtgcttttgcttgtgcagctcatccaagacttcctggcaaaagcgcagttcccattggaacttcttcttctttggcttggtagaatacgggaggtcacgcttcggggggtggatagaccgcttggggcgaccatcggggttcgaagaatcgcggcggatgacgggcagaccttcgggtcctagcgcaaatgtctgagactggggagaggaagccttgggctggcttggcagagaagtccgaggctcccggcgagcagcagacgtcttctcagtgtgcttctttggctttcgctcttcaacctcttcgggcttgggaaggttagtcatctgcttttcgaatgtcgccttcagcttgattccctcttgggtgaccaggtggtctgcgccattgaagacggtggtattattgaccatcagtgcaaagtcatctgcgactgcctggggggacgaatattggttgttcttgagcttcctttccatagttcctagatccatgggttgggtgataatagtgtggtattgggggatgttcaacttgatagcatccacaggttccttgtagaaacgcgcatcgtgcatgcgcttaaggcttgtaaggctcttcaaaatgaacttatgctgcatcttcgtgagccctggtccgccaccagtgcgggttggaccaggtgttgcagcagctggcgagctgtatcccggtgtctggaagttaataactgactcgtcgccctcgaccttggtccgcttaggagctggttcttcgctgagatcagcatcccgttgccgggaaaccttggaaggagatggcggggcctctgatccgtctttcatctcttggtcaacgtgttgcggcgcggtgagcacaggtgggagcgcaggtggtgcaggggccgtggtagggtgatgagggaggtcggttttcacggcagtcgaaacatcttgaggggtatcgataaccattggctcgggtgtgtcactaggaccatctgtcgatgcaggaaatgtggaaacgtgcgccgcaggctgtggggcggacacagcggtactttcagccgcggtgcttgctggagcaggagtggtagatacctggccctgtggaagggcgttcttgtcttcggtcggctgtgcctctgcgggtggagcagatcccgcggcagatggcgtcttgttttgatccactcctggagaggttttgtgctcgggggatttaggcggtgaggtagcaacgattgttccattggtgtttgaaggctcgacgggagtgtggccattgagcgcaggcgatttaacctcggtatccgtgggaccatcacttttgagattcactgtggcattttgcgcgctgcacgccagtcagaacaagaacagagcagatataaagctgatgcgcttacctggtgggtggatagtcaggcgcagaaggaccagtgggcgaaggaggcaattgaggcttgtcctcctttgtaacaggaggagcctcgggaggcggagtcgccattagggtcgcgttggataaacaagaatacaagctagggaagggtgagatggttgaagatgtgagagttataggagagtgtttgaaaagctagtgatcaactgaaaacacccgtcagatctctgcgcgaatcaatcttgccgcgtcacaatctcgagtgaacaaacactagcggcaaccaaagccacgtagtacggactcaatagttgatgaggtttgatatcacacgtgtgggcgcgaataaaacgcgacgggcggggggatagtgaggtcagagatgatcgagagataggaagagtggagaatgcgatcggagacaggtatttatactgccaagaaggcggtatggaagcgttcacgtgacgtagtagaattgacgccaggtctagatgacttggtacagcaagatatggagctaagaacttcccgtgaatgactgcctgaggccaatattgataaaagcgaattatgaaaataaaataatgaaaaaagaaataaaaaaagaattcggggtctgagggcggttaaaaggaaatagcaccgggtgacgcgagacgcgtttgttatgggcagggcggtcagcgaaataaaaataggagaaaccaggacggaagcagaaaaatggtcgggaggggatgccagaatccttaagtacaaacggccgccttgcacgcagttccaccagccacactaatcccgattctctgaccttcttaccccttgattggttctatacccctggccctttttccttttcttcttttcttttcttttgggaacttttcccttttcttatatatgaaggtgaatatactgttgaatatctttttcaaaacactgtttctttttggttttcttcttcggcttttctatacagttctcataaccttgaaagtcggtgggcgcatatctcggatgactcaaagccctagggttttggctaaatccggcttaggccgggcggatgggagtctgagtcacgtcaccactccatctttcacgtgactatatcatgatgagtacacgtattgtaattgataagaaatagcatccttctataacaagtactgagtactccgtattcggcgcaaggtaaaaacttgaatattgaatatccagatatcgtagagtagagtagctcactactatttgctgccaataatcctagaaattacaatcagcactttgcatttacatactacctacggagagcgtaactatgtacatacataccggataatgcctggcactcaagacctttccctttccgttttagtgctcacctcttgccgctttttgatcactgagtaaaactgagcacgtccctgagtatcctgacttgatcacgggccattatataatcaacgtgatctgctcactgagcatcacctgattatcccctgagccccctgatccactcactgatcatcatctgagcaccctgatttgcttactgagtgctctctgagtgtacggctgagcggcctgagtaagctacatcaataaattgcgacacgctaatcccatcacgtgcaaccctttccatttagatcgcccatcaaaaaaggactggcgcagtcaacgtgacccttcatcctagcggtctcgaccctatccaagtgaaaacctcgcagtggggctattcaattgacccatcattttcccattccagcctatgctcctgggaataccctcggaatacttcgcttaccagcccggcgatcctctaatcgggctttggactactaccagggcgagggcgattggacgaatttccttgattagagcccttccctgtatcaagacaactagagtaataagtgtttagcaggtgacgatgatgaactacttctctcgctaatgagcgtgtaagtcgaaggcgtttctgagcgtataacgtcatgtctttcgcgctatttctaagtaggtcgtaaaccgaagacaaaccatcaacagtaatacccagatgagctcctgggagcccgcgggctcnnnnnnnnnnnnnnnnnnnnnnnnnnnnnnnnnnnnnnnnnnnnnnnnnnnnnnnnnnnnnnnnnnnnnnnnnnnnnnnnnnnnnnnnnnnnnnnnnnnnnnnnnnnnnnnnnnnnnnnnnnnnnnnnnnnnnnnnnnnnnnnnnnnnnnnnnnnnnnnnnnnnnnnnnnnnnnnnnnnnnnnnnnnnnnnnnnnnnnnnnnnnnnnnnnnnnnnnnnnnnnnnnnnnnnnnnnnnnnnnnnnnnnnnnnnnnnnnnnnnnnnnnnnnnnnnnnnnnnnnnnnnnnnnnnnnnnnnnnnnnnnnnnnnnnnnnnnnnnnnnnnnnnnnnnnnnnnnnnnnnnnnnnnnnnnnnnnnnnnnnnnnnnnnnnnnnnnnnnnnnnnnnnnnnnnnnnnnnnnnnnnnnnnnnnnnnnnnnnnnnnnnnnnnnnnnnnnnnnnnnnnnnnnnnnnnnnnnnnnnnnngcccgcgggctcccaggagctcatctgggtattactagggttctaaaggttcatagctatttcgttctaatcctaggaattctaagcctcgcccgtttggcctagcatttctgcctaaagtgatgccatttcaaaggggaatatatatgcctagtcacttactccgaaaacaatggtcttcatcattcctctgcatccaagttacttaaccaaaacaaaaagcctgcttttgaatatatcacagtgagttcagccttcattcactcgtcgttctgcatcaactgaccgtactccagattggcatctcttttgcttacgatagtcgaatcgatcaacattgtcagcctccacgcccacgcaaaatctggaagctaccaaaagtacaaccgaggctttaacaacaggactgtgccatcggttgaaccttcgctgacattgcttcagggagactgtcatcagcattggatcaatcggaagctagcaagctcggtcatggatcccaacatcatcttcggttggcaatccggagcaacggagatgcaggtgttagattccaggacactttcagagaatggactaaacactcggccagcgatactatgcacgaaccggactgacatcgtcttgatttcttttggaacataaaagtgcgactattgacagagcggctgcacacgtttgaaaataccacatatacgacgatagaactctctgcgtcgtatgtaaaagctctcaacattacaacactcggctaactggatcactatactagacatgctatttttctcacctctaagagcatcttcaataaggagagaaacgcagtattgaccacggaaatgaaatattgttgcagttgttgaaacaaataagtggcaacatataattcagaacaggcggctggcactccagcgcatcactcatgaggccgaaggtcaggccatagggatacaaaagtccttccttgagaccttgagaggggccatatccgtacttgaggcctcccttaaactttaagtctcgtgttcttcagtcgagtaagacctacggacgcttgctcctcccacattataggtggaccaacgggttcaatagtatggttcgagaggctcacgagcttggcagcttaatagtgggcttttacagtatgagctccggctcccaaaagggcccagacttgcagcgtcactttccccaagggggagcggaaatatggtgcgaatgcgtatgaagatggaaaagagccgttcttccctcgcctttgagaagatacatgatatttctggtgtgcatcttctcagtttgtatcatttcatgctgacttacagacaccgctctgaactgtcagatggacccagctttccctcatcttggaatagtgctggtccccagtaaaaagcttgggtgaaatacggaggacgcctccaatgggacgaacgcacggtatctgggtccttgatcgatttagatctaagacagtagaagggcccctccccatgctcctcagcctaccagctccgttctagaaccccaaacacgaggctggcggatcctcgggcattttgtcgccgataacatgccctgagcacgtcagatttatatgacagttccagtaacgattgttcctggaccagcggtcaatacgtgatttcataccttcagcaactccatttcctctgaaggcctgttttggcgttttgcaatggaatttgttaagattggaatcatgaccggagacgatttgaatgcttttaccgtggttggataataccatttcattaattagcttggttatgggtgtttggttccgtatttgatacatgtcgtcaatgtttctctccgtaaggtattacggctcttctggtcaatctgcacagccaccatcgcgagacagatcagccacaatgtctgtaagtctcgtaattgttgagtttactgaaacagaaatatttttgtaatataccgtcattgtacagtttccgccatccctgccttttccacttttagctgacaccaatttggtatcctcgggcagaccaatggaatgtaaataaacttaagtaagtgtcgcacaaaaacttatcggatttattgatttattgatgggaggctagtatttatgcgcccattactcgcatttgaaagaaaggccttggctacaatccaaaatcacctgcaacaggactaggcgaaaagaacagacatcgctactacgcatgaaaccaataggaagtcttgattcttcgatcctatcttgatacagattagcgcaccgagagagtatggttcgaaaagcagcataagagcacagagataagatctacctcgaaagtactagacatcaaattggaattcaggtgaactagtactgagccagatgcgaatctcctccaaggcatttaggtcattctagaaaagagaatgctgtaccttctcatcgtacaattcgtaagtatggcatcttctaggctctctcatacactccggcaagaaccaaaatcaatgaaaattgtccgatgattatcaatcattatgttgcttggatgacgtcgttatgaaccaacccaagcggatgaagatgcttgaccccactctcgatgcccgtgagaacacaactatagtccgtcacttgccgcgtgcttctcagtattctcttcatgaggccgcgtgggttggcctctttcatcagcatgtgagggtatatctcaaggcaaaaggcccgtgattgtgccgtcagaaacctgacaaccgagatatgtagcaatgttgggacatgggtgccgccttaagagtttcgttaaattcttgcttccttgaggtcctctgcaatcgagtcaggtcgaggtccttgactgattcgatcgtaactgatcaattgaggctttttgacaaagtaattgttcggcagggtttgaggtgctggcgtaaactcagtagaaaattttggattgtaggctgagctaggaatttggataatattttcaaaattctctggctttcagcatcgcgtggtacaaatcccccttcatctgatacacaacgagggtacctgcgaaatggaagccttcaagccttcatctgagtcttcgtagacctcgtttctctccagcacctccagttgttggttaggatttggttgggtcgacatcgctcgagtgcactttgccgtgtcaatcattgagacaccaaatggcagatatgcactcacctagtaaacgtgcacgggaggagggtcaattagactatgaagcggcggaggtgtgaaaaagcgactgaaagattcgaaaggccaaacggcgtatgccatcgtcaaggaacgcaaccatgggcatgtcagggcttattcgtgaagcttctagggctcagctactttatagaaagatatttcatttgatgctataccaggctttgagcttctttgtgtacagcgatcaggttctctaagtgcaatatgggactgtaacagcagatttttctccgtgacctgttacctactgctcatcattctctagtgatggctaccaagaacaaagttgaagagcccatccctgatccagggaatctccagtgctacgggcttgtgctaatgctacttaaactggaaagggatgcactactaaatggatattattaaattactcacccgtggcgcaagtctgcggtgctttaggcaccaaaacgctttagcctttcatgctagctttagacgactggtaattatcgaactacacgactacttgatggtttcacgagggcctagatcgccctcgtcagtactctaaataggttcagcctttctggatactatgcgataggcaagaccatcgtataggaggtggctcacccaacgatatctatcattctcgaggtcctaatttccacttctaaatcaaaacggctgtgcgatctcacttggataaaccatatacgatgctaatagttagcaacattccttttagtctagggagaatagaaattactccacttcccgctccatccatatctcaagcctgtttgcgcctatagctatggctattagaggtcacgtagtccttttggtgatcttaaagaggaaaatagacacaactacatgatcggtccctcgttaagaataggctctgtgggttataaccgtagtactaccttaattgatggcaacggtcatttgcttaggcattgcaagaaagccagacatcgcgagttagcaactcttttaactattggccatagtaaacagcgtggttaagagtggttaagaagagtggttaagaagagtggttaagaagagtggttaagaagagtgnnnnnnnnnnnnnnnnnnnnnnnnnnnnnnnnnnnnnnnnnnnnnnnnnnnnnnnnnnnnnnnnnnnnnnnnnnnnnnnnnnnnnnnnnnnnnnnnnnnnnnnnnnnnnnnnnnnnnnnnnnnnnnnnnnnnnnnnnnnnnnnnnnnnnnnnnnnnnnnnnnnnnnnnnnnnnnnnnnnnnnnnnnnnnnnnnnnnnnnnnnnnnnnnnnnnnnnnnnnnnnnnnnnnnnnnnnnnnnnnnnnnnnnnnnnnnnnnnnnnnnnnnnnnnnnnnnnnnnnnnnnnnnnnnnnnnnnnnnnnnnnnnnnnnnnnnnnnnnnnnnnnnnnnnnnnnnnnnnnnnnnnnnnnnnnnnnnnnnnnnnnnnnnnnnnnnnnnnnnnnnnnnnnnnnnnnnnnnnnnnnnnnnnnnnnnnnnnnnnnnnnnnnnnnnnnnnnnnnnnnnnnnnnnnnnnnnnnnnnnnnnnnnnnnnnnnnnnnnnnnnnnnnnnnnnnnnnnnnnnnnnnnnnnnnnnnnnnnnnnnnnnnnnnnnnnnnnnnnnnnnnnnnnnnnnnnnnnnnnnnnnnnnnnnnnnnnnnnnnnnnnnnnnnnnnnnnnnnnnnnnnnnnnnnnnnnnnnnnnnnnnnnnnnnnnnnnnnnnnnnnnnnnnnnnnnnnnnnnnnnnnnnnnnnnnnnnnnnnnnnnnnnnnnnnnnnnnnnnnnnnnnnnnnnnnnnnnnnnnnnnnnnnnnnnnnnnnnnnnnnnnnnnnnnnnnnnnnnnnnnnnnnnnnnnnnnnnnnnnnnnnnnnnnnnnnnnnnnnnnnnnnnnnnnnnnnnnnnnnnnnnnnnnnnnnnnnnnnnnnnnnnnnnnnnnnnnnnnnnnnnnnnnnnnnnnnnnnnnnnnnnnnnnnnnnnnnnnnnnnnnnnnnnnnnnnnnnnnnnnnnnnnnnnnnnnnnnnnnnnnnnnnnnnnnnnnnnnnnnnnnnnnnnnnnnnnnnnnnnnnnnnnnnnnnnnnnnnnnnnnnnnnnnnnnnnnnnnnnnnnnnnnnnnnnnnnnnnnnnnnnnnnnnnnnnnnnnnnnnnnnnnnnnnnnnnnnnnnnnnnnnnnnnnnnnnnnnnnnnnnnnnnnnnnnnnnnnnnnnnnnnnnnnnnnnnnnnnnnnnnnnnnnnnnnnnnnnnnnnnnnnnnnnnnnnnnnnnnnnnnnnnnnnnnnnnnnnnnnnnnnnnnnnnnnnnnnnnnnnnnnnnnnnnnnnnnnnnnnnnnnnnnnnnnnnnnnnnnnnnnnnnnnnnnnnnnnnnnnnnnnnnnnnnnnnnnnnnnnnnnnnnnnnnnnnnnnnnnnnnnnnnnnnnnnnnnnnnnnnnnnnnnnnnnnnnnnnnnnnnnnnnnnnnnnnnnnnnnnnnnnnnnnnnnnnnnnnnnnnnnnnnnnnnnnnnnnnnnnnnnnnnnnnnnnnnnnnnnnnnnnnnnnnnnnnnnnnnnnnnnnnnnnnnnnnnnnnnnnnnnnnnnnnnnnnnnnnnnnnnnnnnnnnnnnnnnnnnnnnnnnnnnnnnnnnnnnnnnnnnnnnnnnnnnnnnnnnnnnnnnnnnnnnnnnnnnnnnnnnnnnnnnnnnnnnnnnnnnnnnnnnnnnnnnnnnnnnnnnnnnnnnnnnnnnnnnnnnnnnnnnnnnnnnnnnnnnnnnnnnnnnnnnnnnnnnnnnnnnnnnnnnnnnnnnnnnnnnnnnnnnnnnnnnnnnnnnnnnnnnnnnnnnnnnnnnnnnnnnnnnnnnnnnnnnnnnnnnnnnnnnnnnnnnnnnnnnnnnnnnnnnnnnnnnnnnnnnnnnnnnnnnnnnnnnnnnnnnnnnnnnnnnnnnnnnnnnnnnnnnnnnnnnnnnnnnnnnnnnnnnnnnnnnnnnnnnnnnnnnnnnnnnnnnnnnnnnnnnnnnnnnnnnnnnnnnnnnnnnnnnnnnnnnnnnnnnnnnnnnnnnnnnnnnnnnnnnnnnnnnnnnnnnnnnnnnnnnnnnnnnnnnnnnnnnnnnnnnnnnnnnnnnnnnnnnnnnnnnnnnnnnnnnnnnnnnnnnnnnnnnnnnnnnnnnnnnnnnnnnnnnnnnnnnnnnnnnnnnnnnnnnnnnnnnnnnnnnnnnnnnnnnnnnnnnnnnnnnnnnnnnnnnnnnnnnnnnnnnnnnnnnnnnnnnnnnnnnnnnnnnnnnnnnnnnnnnnnnnnnnnnnnnnnnnnnnnnnnnnnnnnnnnnnnnnnnnnnnnnnnnnnnnnnnnnnnnnnnnnnnnnnnnnnnnnnnnnnnnnnnnnnnnnnnnnnnnnnnnnnnnnnnnnnnnnnnnnnnnnnnnnnnnnnnnnnnnnnnnnnnnnnnnnnnnnnnnnnnnnnnnnnnnnnnnnnnnnnnnnnnnnnnnnnnnnnnnnnnnnnnnnnnnnnnnnnnnnnnnnnnnnnnnnnnnnnnnnnnnnnnnnnnnnnnnnnnnnnnnnnnnnnnnnnnnnnnnnnnnnnnnnnnnnnnnnnnnnnnnnnnnnnnnnnnnnnnnnnnnnnnnnnnnnnnnnnnnnnnnnnnnnnnnnnnnnnnnnnnnnnnnnnnnnnnnnnnnnnnnnnnnnnnnnnnnnnnnnnnnnnnnnnnnnnnnnnnnnnnnnnnnnnnnnnnnnnnnnnnnnnnnnnnnnnnnnnnnnnnnnnnnnnnnnnnnnnnnnnnnnnnnnnnnnnnnnnnnnnnnnnnnnnnnnnnnnnnnnnnnnnnnnnnnnnnnnnnnnnnnnnnnnnnnnnnnnnnnnnnnnnnnnnnnnnnnnnnnnnnnnnnnnnnnnnnnnnnnnnnnnnnnnnnnnnnnnnnnnnnnnnnnnnnnnnnnnnnnnnnnnnnnnnnnnnnnnnnnnnnnnnnnnnnnnnnnnnnnnnnnnnnnnnnnnnnnnnnnnnnnnnnnnnnnnnnnnnnnnnnnnnnnnnnnnnnnnnnnnnnnnnnnnnnnnnnnnnnnnnnnnnnnnnnnnnnnnnnnnnnnnnnnnnnnnnnnnnnnnnnnnnnnnnnnnnnnnnnnnnnnnnnnnnnnnnnnnnnnnnnnnnnnnnnnnnnnnnnnnnnnnnnnnnnnnnnnnnnnnnnnnnnnnnnnnnnnnnnnnnnnnnnnnnnnnnnnnnnnnnnnnnnnnnnnnnnnnnnnnnnnnnnnnnnnnnnnnnnnnnnnnnnnnnnnnnnnnnnnnnnnnnnnnnnnnnnnnnnnnnnnnnnnnnnnnnnnnnnnnnnnnnnnnnnnnnnnnnnnnnnnnnnnnnnnnnnnnnnnnnnnnnnnnnnnnnnnnnnnnnnnnnnnnnnnnnnnnnnnnnnnnnnnnnnnnnnnnnnnnnnnnnnnnnnnnnnnnnnnnnnnnnnnnnnnnnnnnnnnnnnnnnnnnnnnnnnnnnnnnnnnnnnnnnnnnnnnnnnnnnnnnnnnnnnnnnnnnnnnnnnnnnnnnnnnnnnnnnnnnnnnnnnnnnnnnnnnnnnnnnnnnnnnnnnnnnnnnnnnnnnnnnnnnnnnnnnnnnnnnnnnnnnnnnnnnnnnnnnnnnnnnnnnnnnnnnnnnnnnnnnnnnnnnnnnnnnnnnnnnnngtggttaagaagagtggttaagaagagtggttaagaagagtggttaagaagagtggttaggaagagtggttaagaagagtggttaagaagagtggttaagaagagtggttaggaagcggttaagacctgaacgagagttgaaggttaatcggggaacgtttcgatgtaagtcttggtcatatccagcatttgctcaacgcatccgagcgactctctcattgaccgatttagcaaacaaacctcagggcgcactattttgagccctaggcggtccggtccaccttccagcgacgagaaaagttgattgcaccatctaggaatgttggcattgtgaaaacttctgcataaaagcccaggccgatacataaatctgcggtgtacaactactcttcattctcacgagcccggcaacgaagatatagaatcataaaacgacaatacttgctctctcttttggcaaccgatcattggcggaacaatacccggcaccctcgtgtgatgaaggtagcaacttagccaagcgcacgcatgtgagtctggaaactaaggtggtagcttgccgtgtactgctgtattgacattctgatgtcatgctctgctttcaaatgcgatttttgcccgagatgaagcgtcctgcggcggacgagtgtgttgtaattgaaaagtcattccattattcggatagccgcctgcgaaagctccgatactatgtaacttaggatggcttcgtgcgtggggaaaacactgcgcgcaaataccgggaaccaaaattgtacagctgcttttagtttttatcttccgcaacagagctttgaagatcaacacatggtaagaagtagtcaggatcgtttcaaatccagtcaggagagattttgggcttgtattctagagttcattcataatcgggtttttctggcttatatatctttcaatccgcgcaaggttcctctgaccatgccttcgcgatgagtccctgacattttgatcaatggaactgtcgtatacgcgaaacaacctgagacgccaatgcgcatacatggacaatgatcatcaaggactaatcacaagcaaggttgattcccatgcggctaattcaaacgctgtcacagacctaggcttgaagccattatagtacacacggaggttgcctctgccaacagaaccatagactctgggaggcagtgggatgtttggagatcagatgagtctgcgccttagctgcagcaacccctggtcgtttgtagccaatcaaaccagtacccggcagagcaaaatgcatcccaggagctttggtattatctttaccacgaaaaaaaaaacctaggcagctagcattaaccagccaatcaaacaaagtatagactgagaaatgctaccttctgtgaatctatcctaggagcatttgtatcatgcaaagaccggggtaaattggccaatggttcatcacactatgcacgaaccttgattcgtaagtagctcttggcactttcctggcactcttctggcactcttctggcacttgctcttcaacccttcagaatgtcatccaacctacctctaacaggcttgatatatggatcgagcggaaaatggagtaacttctattctccctagactaaaaggaatgttgctaactatagcatcgtatatgctttgtccaagtagaatgcacatttactacctcggcgccgaaaccggattggaatgatttcacgtttcagaagtcagtttgcagcatgtattcaaaccgttgctggatatttgtcccgcgaggtatcgatgagaacgcatacagccggaataatatctagaaagtcgggtcaatattgatgtcaaaagatataatcaagcatagaagcaagaccatagctgcagcatccccctctgtccatgaatgctcgtcaataactactatcacccacatatacccgaccagatagttcctataccctgcgcttaccacggacttacatagatcccaccaacgccgggattagacgcccagaaactgccaagtgtcccgcccagaccttcggccagtagaaccccgcgaatggccctctcggcatatagcagtaagatgagcgagttctcatacggctcgtatccaattgcattagcgcacggcgttgcagtgccttaaagcaggacggtcgtcccaacaatctcgcagagtaactcctccacttcacctcaggcaataggctttccacgcctcatctcacaggaaagatgaacagcatcaaagcccgattcaagaggatgtcaataggtcggaccgggaaggatcccaatgcaagtggaaagacagacgccgcagcctcggcagagaggacgccaaacgaaggccggaagaatgcgccagccaattccaatgccgcgaatgttgacagtggtctcgctgccgcgcggatgttcatcaaagacgaacgggagggcagtttggtgtttaccatccaggttgcgaccgcttatcgcccgcgcatcgcggtggatgtgcatcggtttggcaaggaacaaggggacgggccatatggaaagctggccggcttgatgaagatgtcgggggcggagcacgggttcgtggaggcggagcatccgtcgtttggttggagatcagatgagtctgcgccttagctgcagcaacccctggtcgtttgtagccaattaaaccagtaccgacccggcagagcataaatgcatcctaggagcttttggtattatcttaccacgaaataaaaaaattagaaaaaaataggcagcagcataggctggctctggggctgattccgtttgtggtcaacgaaaaaattagcagagaataattgctttttgtaaaacgtccaacgctgaacatatttaggtgccgcagtttcctgccgcagcatgtccgtattggcgcaaatcccaacgtgtacggccccaagagcttcagccaccattccatccccccgcaggagcgtggtttctattgtagccaataataacggaccgaaatgccaagcccaatcaaagagcggtgtctgtcgtgtccttcgtgtctgtcgtgtccatcgtgtccatcccgtcgtgtccgtctgtcgtgtctgtcgtgcccatcgtgtccatcgtgtccacaaactcatcgcggcaaatatgaacaaattcgctccaatatacgaaaaacacaaagatattggtgcagaacaaaccattcccgaagccgacatctcactatttgaagaacgcttggtcatagtttgcacagtcgacgagacacaaaaccacaggcgtgtgagaataccaaaccgtgtgaaactcatccgatctcgagagcggaaggctcaaaggctttatctgaaaatcctcgagaagtttcctggcatttttctcgctttcatcctctcagtctccccgagagcttctgtagattttgacctttcggccttttgtgagcaacacactgaacaacctattgttctctgcgacaatgctgaatcgcttctttggcgaagtgccatcagacacggtattgagaagtctaaagctttcggaaagttgatgagtctacttttcagcttgcctcgcccagcgacagaagccgaaggggaagaaagttgttcgttatctctgagccgtctttctgtgatccgcatcgcttttggtgatataatatgtgaggcagttgaatgttctcccactcatcttccaatgaatgcggacagcgattatgcagaaataacacagtgtgtcaggacgacagtattctataaccaccaggacaccatcattcatattgatgtgggctgcgcggtcaagctcgctgacatgctcttcccttctgcaagcagaagaatcaattctgctctctcccagtccaatgccagcattcaggcgcggaacccaaaggctgtcttgctcccagggatgcaatcagaatcactggttcaagattacggtacgaaagagtggcgttccatgacaatgcagtgtattaattagccctacagatttcgcatacttcacgttgcgtggtgcgtctgttgccggcataagatcggtgttcagtgcctccatctgtgaagctatagaggagagcgaattgaggagatgggaaaagcaccatctgcttactgaagttacagactgtatcacgatgcagctatggagagcagaatcacaacgtggtctcattaaattgcgagttggatactatacaggagtcaatttggcaaacaaactttatgcagaaccccgttcatgcatcgcttcttgaatcgggccgtcaatctatttcggtgcaccttgcttttccttttcttatccaagctccaacgttctctggaagaacaattgcgccactcccctttgtctcgcatatcttctcccctccttgtttctgaaatcttatatactcgcattccaagcaatataaatttcttgggaaaggttgcggctcgatatcggtaattggaagggctctgtattttgagaggcggtcgacttcttccttgggaagctccttccactcggcctgagataggcgctcgctctgggataggtcagaccatacatcctagaaggcatattgtagcgactcaccaaggacttttctgtgattgaatctgccatcttcagcgaatgtttgagcaagaaaagggtttgcttgcgcgacacgtcttggatctcttcggtcgagatgggagtaactctcaccgcaagattttgaggtgggcgtgaacgcaggaaaagtatgccacaaatttttgcccagattgaatagcctctgaggaatataaaatataaagacgagactgggcacgaagaatgaaccttgggaatcaaccgcgggttaggcatcggctgaaaattgcccaactctgcccctcattcttcttgcacaatggtggggccaccttgtggctccggaaatcgccacccacacgtgactcgcaattctccggcaatgcgtaatgacattaaccgagatccattcgatcgaggagatagagtttcaaaacagctaaggtgtccaaggtgtccaaggtgtccatcgtgtccatcgtgtccatcgtgtccgaggatcgccatgatggagactttagcttgtgccgcagcccaggctctggtagtatttctactttgactgagcttgatccccatttacctacctggcgttccttgccttctcggcaccacaaaaagattgctgcaaaatctagtttaataagtcgtaataatctaatttgtacttgatgaccatttctaacattcctaatttctatatagatggatccatggcagacatcatagattggcaacttataccgatctacgacaactactttcatgcctctatgtccacgaataaatgacatattgaaataactgcatctcaaccgttatataagtcatccccaagctattctgcaggctgtagggggacaatatccatgatcacatgcaaaactgcaaagacccagatacgagtcgtcttcgccgataagaggcgccccacgagctccagttgatggtggaagcgggattggagttccatactgcgtacaagtgcagggtccagatggacaataaccatagctgcaacaaaacgaacacaacccgctgtagttgctggctcctgttcctgcaatgcaggccctattcctaccaccaccccctcctcctccgcccccgccgccgcctccacctccagcatttccaccgccagttccacctccgccgcaagttcgggttggaggtgaacttggtggagttatagcctcggtaactgtcacagtgacaacagttgacgaaatagcagagcatggtccaggggcttttgttgtgcccggaggagaacttggcaatatggtgctcttacttggagatggagcaggtgggggtactgtacttaatgagggggtaggttgacatgtccggacacgcaggccctgtgtgaaggcagagagcccttctggctggagggcatcattggatcctggtggaagcgttccgactgcacgtcaaagttaaaagggggctatcagcagtgctatatcttcacttaccgtaggcgttgaagttatacaaaccacacacgcacccgtcgataacctccttcaaactggtccctgacagaatggtctcgccgtcgcgattgacctcaaagctttgtgtaccaactcccattggcacctcctttgcacttgccccggctggcgcttcgtaattatggatagtcccgccgctgttgacctgcactgtggctggggctgtaagcaatgatacaatgaagacagagtcggccatgaattcccagccatctggacgacccatgaaatagttcccactgccattgttcgctggtaccatgcaggtgtctgtagagtcgcagttcaccccacgtggtgcaggtcggtaccagtagactaactcatcagatgatatatgactgtctggagacgactggtctgctttgaacgcggcgatgtacggttttgaaatgtccagccatccttcgtggggcctgtagttatacattactttggctcccgttttgaaggtttccacgggtggatttgaagttctcacatgtcgttaacccatttagaggccccgtcgtcagtgtgcggtgatcccaaaggaccaatataatgagactctccatagtcattccatgttacaatctcgataaatcgcggtttcaactcaagaatctcattccatctgttaaaccacaggagatcagacgggaagttccagtttttgctataagaaacttcgggtccgaaatgcgtggaaaaccacggggaaacagctgcgtcaaagtcagaaaaattaattcaaatttggatgaaaactaaactgacgggcaatataggccttccgccaagagcatcgacatattccctatcaccgtcggcgacagaaatactctgctctgcagttggggctttgttctttccgttgtttggccacgccatccaattcaagaggccgtcaactggcgagatatctgtcccagttgatgggtggaaattcggtgcgaaaaagaccggtcttccaactgctgctcgcattgctgcaacattcattccatcaccagcgaatgatgaaacgaataccttgtcatcgacgagaagttgtgcaggtttgctagcatactgggcaaccttctggccaacttcggcggcctgttcaatatgccaccagttgaaatcaaatgatagaaaggctttcatgtcattgttggcggctgagtcgtatgccagttgaagttgttgatcagtacagggatctgtgccaatgttcagagcaaacgcatcaatgcctagagacttagcccgtttcatgtcgtcatcgtagtccgatgcgctgtttctattgctgacgattccaatcttttaaataatcagtatatgttcaacagacacaaggaacttgagggcatatttaccataaagtgtgcaaagaccagtcggtctgtcgattgtcttttgacacgacgtatgccatgattccccgtagacagtgcatgaactatagtggatagtaaagtaataacacacaaaatgaaccgcatattcatcatgatttgtaagttcacttagttcatcttgggtcaatcttcaggattctggtttaggtatccatatgtgtgttgtgcgcgttccacgcctttaaatagtcctttcattctccagatgacgcggagcttctcgctgctgacctacgaagcttaaatatcaggatgatgagtgtgatatttgatagttatctctccgagcccgatcaaagccttacattcagggaaccatgtggttgttacagagctttgggcgacatcatcgttgagtgggaacgctattgcccacaagttctcgttattgcgcggttttccgcttcaattaggtacagggtggccgccggatgattccttgcgtagtagtggttgtttaattctatatagttatacatgccggtgaccgtacacaaatcaaaaggtaggaaatggtagaagccgtagaacatctaagcccttgtgattcgacatgagcgtaggggtcgatggatagttctgctgggcttttaggattacactgccatttttccggaactgcatccgtgtctgccattcaaaaaaattgtgtagtttgttggtgccagaatcaagaacactattcagaaaagccatcaaattacaccttgtactaaccacctcgtcatttagcctttgcccttataaatatattccgtgcagatggattcatggaaaacttggggcaagataaccattgaagcctttacataaatgtcaaataatccacacaagtgacaatcaacttcacttggttctagatgcagccccaatccattagtgctcaaatctccgcctgtctggcgcatttgatctagtgtagtacaaattttcttcatcttgcttgaagtacgctgaaaacttaattcctgtaaaaataaagcggttgggtcgcttttcagtagcagattcgcgcccattgatccgggtcttcagagttgagacaggtatctcaaaaggtcgtgcagcagcagctgcagggggatatttgccattttgtatagcttgtatggctaatagaaggcgaccctcctgctctatcaaattttctttcttatcggggcgtttgggggggggnnnnnnnnnnnnnnnnnnnnnnnnnnnnnnnnnnnnnnnnnnnnnnnnnnnnnnnnnnnnnnnnnnnnnnnnnnnnnnnnnnnnnnnnnnnnnnnnnnnnnnnnnnnnnnnnnnnnnnnnnnnnnnnnnnnnnnnnnnnnnnnnnnnnnnnnnnnnnnnnnnnnnnnnnnnnnnnnnnnnnnnnnnnnnnnnnnnnnnnnnnnnnnnnnnnnnnnnnnnnnnnnnnnnnnnnnnnnnnnnnnnnnnnnnnnnnnnnnnnnnnnnnnnnnnnnnnnnnnnnnnnnnnnnnnnnnnnnnnnnnnnnnnnnnnnnnnnnnnnnnnnnnnnnnnnnnnnnnnnnnnnnnnnnnnnnnnnnnnnnnnnnnnnnnnnnnnnnnnnnnnnnnnnnnnnnnnnnnnnnnnnnnnnnnnnnnnnnnnnnnnnnnnnnnnnnnnnnnnnnnnnnnnnnnnnnnnnnnnnnnnnnnnnnnnnnnnnnnnnnnnnnnnnnnnnnnnnnnnnnnnnnnnnnnnnnnnnnnnnnnnnnnnnnnnnnnnnnnnnnnnnnnnnnnnnnnnnnnnnnnnnnnnnnnnnnnnnnnnnnnnnnnnnnnnnnnnnnnnnnnnnnnnnnnnnnnnnnnnnnnnnnnnnnnnnnnnnnnnnnnnnnnnnnnnnnnnnnnnnnnnnnnnnnnnnnnnnnnnnnnnnnnnnnnnnnnnnnnnnnnnnnnnnnnnnnnnnnnnnnnnnnnnnnnnnnnnnnnnnnnnnnnnnnnnnnnnnnnnnnnnnnnnnnnnnnnnnnnnnnnnnnnnnnnnnnnnnnnnnnnnnnnnnnnnnnnnnnnnnnnnnnnnnnnnnnnnnnnnnnnnnnnnnnnnnnnnnnnnnnnnnnnnnnnnnnnnnnnnnnnnnnnnnnnnnnnnnnnnnnnnnnnnnnnnnnnnnnnnnnnnnnnnnnnnnnnnnnnnnnnnnnnnnnnnnnnnnnnnnnnnnnnnnnnnnnnnnnnnnnnnnnnnnnnnnnnnnnnnnnnnnnnnnnnnnnnnnnnnnnnnnnnnnnnnnnnnnnnnnnnnnnnnnnnnnnnnnnnnnnnnnnnnnnnnnnnnnnnnnnnnnnnnnnnnnnnnnnnnnnnnnnnnnnnnnnnnnnnnnnnnnnnnnnnnnnnnnnnnnnnnnnnnnnnnnnnnnnnnnnnnnnnnnnnnnnnnnnnnnnnnnnnnnnnnnnnnnnnnnnnnnnnnnnnnnnnnnnnnnnnnnnnnnnnnnnnnnnnnnnnnnnnnnnnnnnnnnnnnnnnnnnnnnnnnnnnnnnnnnnnnnnnnnnnnnnnnnnnnnnnnnnnnnnnnnnnnnnnnnnnnnnnnnnnnnnnnnnnnnnnnnnnnnnnnnnnnnnnnnnnnnnnnnnnnnnnnnnnnnnnnnnnnnnnnnnnnnnnnnnnnnnnnnnnnnnnnnnnnnnnnnnnnnnnnnnnnnnnnnnnnnnnnnnnnnnnnnnnnnnnnnnnnnnnnnnnnnnnnnnnnnnnnnnnnnnnnnnnnggcgggcgcattgttgttgtggcattgatctctttccatggtgcgttcttcagaagaagtcgtccctgttgcttcggggctgaccacggtgcatcgaacacagtctcaatcgcacggtgatccgagccgtgctctgtcccatgtatctcgagatagagaggcagagggttggctacttcctacagtgcttacgcagtgcttacggggcagcttccgtgttgccttggttctggttcgcccactggagaaagggtttggggtcaagggtttgagagcagaaagagccatcggagcagcaattgcaaaggaagctcacataggtaaacgggcggtacctcaatcattataccgaaacggtggagcttatgactcactggagttcgaaataatgtagtaagggactatgcaatcgaatgggtaaaaattatggtttggagctctggaaagtgcttttctatctcataggcttgtatatacagtaacatttcaagtaacacctacacccaaccaccgtaagtgcttggcttgcagccaattccacgaaacagctcactgaaatgcgagatgggcaatggcggttcaaacaggaaactcacgcgggttggcgtgtacaatgcgtgagttgtggttttctaggaaaggtgttgcgtcaaatccgttgacattgtggagatccgctaactgtgcagcaagaggttcatctccttggggccacctgattaaaacccagtccggccttttcccgtgctgccgaagtacgaagactggcaaaatggtcttagctttgtgcgctgtgccgaaatcataatcatgatgattgatgtcgatgacaataaaggtacgttcactccacacgtctatggcaagcaagagaatgcggggatcgctttcccagtccggaaaaacctcgctgacaactgtgtttgctgaagcacgatagtcttggggatccaaactttcggttttcactttgatgacaattcgttttgcaatgtcgatttcgaggatttcttttcgtatatcagataggttggccattattactatgcaatctcgggtctggtgttcgaactgggcgatatagtatgagaaagttcagaaaagcaatttgtgaaagtcaggtagagatttggagacgaacaattattgcgtatggtaaatgaatgaagttacacgaccattcctttttatggctgggatcacttattaatacgctaatcctgaacgggtaagtaatgccggagaaacgccccttaccttaccaagggtcttgctacgtattaaggcaacctatccgatgaaggaaaatgggggtacatacaaggttagtgttgcccatagagaaagacttataatcacgtgttttcttgttacttcatacaactaaatacaagatacacgcaacctgagtctatgctaccccaatggacccatcaactgaatgtcgtcggctgactattcgcgtctcgcagcagctagtgaaaactaggtaaaactattttcggagcttgacggagaaagatatgaatgctgtgcgcatttgcctggtatccacacgatctcccaaacttgccggggatcagttgtggtaggcagacaattgcctcgatcacagggcctggctttgtcggcacggaaagggcatccgcagccttggtagtacttgtcgtcccagttgcacatctattgaaaattttagagaggtggtctatcaactaggtacaatagcttggctttaccttcgatgcaacgtattgtctaacgcgcctttgaatgacgaaagtttggtgataagcaagctggaatcggcctgggcgaaggaatgatgtggaggataataggacgggagttggagaactgtgtatgagggttgttgcggaagcagtagggaaatgcgcggtgattgcgtttttatatgcagtttcatgaggttcgctccaagactacattttggaccaaagggttgtagagggacggccctcgcaaagatgccgtaacggaacgaagcatgcagatcggagatggatgccctcatcaccaatggcaaaatgccagcagcagggaccccgttagctcggagacaaaattcgcatcccggcgaaatgagagacgcagagacatccttacgatcggagatgacacaaggctggctcatagctcagcgtggggacaaatcatcccgcaattggtggccaacaaaggagatgcatcattatgcatactaggagcatctgtattatctagagactgcgtagattgggccaatgattcagcgcaggagcttcagccaccactccatcccccccccccgggcagaaggctggtttccattgtagccaataataacggaccgaaatgccaagcccaatcaaagatctgtgcccatcgtgtccattgtgtccaccgtgtccaccgcgtccatcgtgtccaccgtgtccatcgtgtccattgtgtccaccgtgtccatcgtgtccatcgtgtccattgtgtccatcgtgtccattgtgtccaccgtgtccatcgtgtccatcgtgtccattgtgtccatcgtgtccattgtgtccaccgtgtccatcgtgtccatcgtgtccattgtgtccatcgtgtccattgtgtccaccgtgtccatcgtgtccatcgtgtccattgtgtccatcgtgtccattgtgtccaccgtgtccatcgtgtccatcgtgtccattgtgtccatcgtgtccattgtgtccaccgtgtccatcgtgtccatcgtgtccattgtgtccatcgtgtccattgtgtccaccgtgtccatcgtgtccatcgtgtccattgtgtccatcgtgtccattgtgtccaccgtgtccatcgtgtccatcgtgtccattgtgtccatcgtgtccattgtgtccaccgtgtccatcgtgtccatcgtgtccattgtgtccatcgtgtccattgtgtccaccgtgtccatcgtgtccatcgtgtccattgtgtccatcgtgtccattgtgtccaccgtgtccatcgtgtccatcgtgtccattgtgtccatcgtgtccattgtgtccaccgtgtccatcgtgtccatcgtgtccattgtgtccatcgtgtccattgtgtccaccgtgtccatcgtgtccatccgaagatcgccatgatggagacttagtctctgaaatctggactcttgagtacgttgctaaagactgtatcaaatcccgcattgacctccgtcgaaaagtaaatccatctgatcgacctcacgcaggaaacaaccattcagtagcaagtctgaatccggagaaccatagccaacgatgacatccgcggtaccatacgagaatttgtacgtttcaggggtatatagtcttgtgtattgataacagcctcgataatgcggacaatccaccacgcttggtgtggagttggccttgaaattggatgggcataactaatggtgagaacaggggtagtaatgggacattggtacgattcaaacgatatataatcttgcatatctataagatctcggcatcgtaggtccttcaattgagtgctgtgctgttttcaaagtgtccctgcggagttcaatactttccctgtctctcaaaatcaaagtcttgtgcgaaatatgggtatatcaaataccctctggtctcgttttatcgaactctttggacgctgcagggcgaggaagcagtcacaggaaggccttcaaggtttggatgcgtttttgacaagttagactgcaacataataaccgttgatccagaagtggtgtatcagtgttcggcaccgcatcgtggaacttccgtcaaattgatctctgcagaagaactggacgagcttgcagtgagtgtcccggaactgttgcattcagtcatcttccaatccatggctctaacgtataataaatagaaacaaccatctagttcggacttcaatgtcggtaatctgcgcatacgcatacttggacaactggtagatagcagaagtaccaatgtttaccatatgcagcgcgaaatcaggaaaacggaggagatcccgggcacaaaggatcttatgcaggagttgtggtttgagcactactgggcctcgcagacagagctgattaaatcttcgattggacgtgatctcctgcaagacgaggcctccaaaggagttagcgagcccttgcctgaagatcacgctttcaattattcctcattcgcccagcttctccataccctagatagtgccatcatgcagttaatctgaattatatggccgatgaatcagagcggctgtaaactagaacctatgctggaaggataattaagccaaggccacagtcggtcgaggctgagggctttggtattataatcttgatcaaattctacttgcatccccaccgctagttctatccagcaattgcatctactagtcttttggatctgtggagatgcgttggcgagccagccctcacctataaagcctgagtcttcgtcgaactgacagccttctgtttcctgttctgaacaaactatttcatttattagcttctattcactttacttcaagatgtctgacatggaaggcggctcgcaatcttgatgcaagctctggtaaaaacgggattggactatatttgtccgggatgttttaagctcttttcagatccaaatgcttgctacagtcattgtcgaaaggaaggggatgaaggggatgatatccacaaaggtcttggtctgatcacgaagaaagattttccgaaattccttcgatgctaccgggttgctattggcttccagatagaagaaagagctcttcccttgggagagggcccaggacgccgctcataccacgaatgtttctctgttgagtttgtacttaacaattgtggtcagtcttttcacccaaacgcaagccctatgtgtcgaactgacgataaaacagtcgcaaaaagagaaataatcgacgcaatgcggttggccgtgattaagatctaaatcaacatcccattgggttagataaagtcatggtagtgcgttgcagaggaaactcgtcgaccgacggcaaactaacatcgcaatttagataccgacagaaagctttcaatttgaccccctcatccaacggcagtctttgacagctggggggcaggagaagagcaaaggaaacgggcttggcgaaaaaccagttggaggcgtggtataagattcagtgatttgaagttggattggacagttgtatatatacccgtctttattatttcccattgactagtatgatgcggataggccaagagatggtcaaaactaggtatacaagaccccgtcgcctatgatcacgtgtcgttctaatagccgtaatagtcccctcaatctttccttgaagtttgccaacgtgtccggttcacacattttcgtgtagctgaggtggatggatcggcacactgtgtcaaattgctcgtcaaagttggcgaagaattgaaggagcccctggggtagaggcaccattttcgagctaaaatgccaggcgagaagagaaagcatagccaaatcacaatcagcgagttcacctgccatacggtgggcatagttcctcagccgtctgttcttggccaaggctctgcgttttccccagggcaagtagcgatactttctgagtgcctggcaggaggatatcaagaatgtggtcctgtcattgagcttgtgctgtcgtttgattgcgcgcttgaggtatttcgagcccagaaaccacacttgttgaacaattaaagtcgtttcggcggctcggaaactggttcttgggaaaggaaacttcatagtttagcatatcactgtatataatccagtgattgtcttacatagaagtcttcaactagcgacatgatagcaggtgcttgggattctgttggaatactggagcatggttccggtgtaagatgggctggtccagtatttgtgttatgcccgagatgctcccgggtcccttgatccagattccggacgaataagaagaggttatttcctggatgcgacattggtcttctaatagtagtatcgccataccacagacgctaacaggaggctttcccggcctattaagagcaagtattttggcccactcccaaatacaaagcctttctaaaagttgaaatttccgttttactgaaaaataatgtaaacttagcgccattgggcagccggaatacttctagcccttcataccatgtgttatctgcgtccgcctggagcggatcgatgctagttcagggccactgtggagatcaattatatgcagctttcattggataactgactgagtgcccgagaactgcatgccgatctcggttatagggataattttctccattgcatttctttttgcgccatttcgaattaccaagaaatgacccttcttacttggtccctgcacatgggggttctcggagtgcccgagtgcattgcttagaaaggatgttttatttgtgccagggcgttccccaaactccagctcttcaactccctcgtacagtaccgtccattgcatacattgcatccctttcagtcacccgcaatggactttcgaccaatcttccaacatttttctcatagtgagtaaacttatcatcctgtcaacttcgatactgataggcctgaagccatagtcttgaatgacccaagagggtattctatgacaccttgcctcagtattctggcagcatgtagagagagatatggtcagcttgaaaccggcgcactctcacctgcctacatttacctggtcatgatcgaaaattcgacctactatacaatgaacggagaattgggtcagcttcttcggcgattattgtatgatcatcttcaagaagagtggctcaaagaaactgatatgggccgtttcattcatgttactctagcggtcaaaagagaagtgcttattcggtgtgatatattttatgacatgcgcggctatacctcagtagccgggaatgtggaggggactgtcctcgccgaaagagccattctggagacgtttcagcctatcttcgactctgatctggctatcggagcgtgggtgattgagttctctttttccgacttccggccgagggtctctcggataggttcacttgaggatttgtgttcgatatttcgccctgtatgttaaattttgtcctcgattgacaggacatttaagaattgatatacatggatttgagcgtgctcacagcatagatgcgagcttttgtatagaggcatgatctttttattagctgcatgcttgaagttctggagacagctaaaatagcacacctacactacccatgtgtacttgctttctccagttgttagtgtcagtatacgagttaactttctaatgtctttatgataagagttaggtatgaagcaagccttggttatgtattagcagtgatcctaatgcatgtgtttgttcggatcgggcaaggtcaagcaatggagaaggggaatggagaatgacattattgaggtaacagggtgagatttgctatggtggctaacgtagagcagcattaggtgtatatacatactggtaagaacgaaaagaaatactccattgagcagctattgacagattgctgcaacgatgataacataatccgacgatttaaatatacaagaccatttcccctcaaacacataatgttccacaagccctagtagcctgataaaccttctcttgaagctctttacagactccggttcggccattgtcgtgtatcggcgatgaatatcagtgcaaacatcttcgaagattttcgaaggctcgtcgaagaatagaagaagctgacggggaagaggcacactaaaatctgcgttgaaatgccaggtgagaagtgcgaatattttcagagagtcgtcggtgaggtcttccaccatggcttgcacaagccgattcaaaatgctgttctgggctaaacgtttccgtcccttcctgtatccattcttcctgagatgctggcaggctaccactagcgatgcaatctcaggatcgagatcgtgttgccatttaactgcatttgccaggtccggggtacccagcgaccagatttgcaacgcttttaatgatgtttgggctgatatcttgaggtcggcttcgaaatctgtataatcaatcttaataatcaatcttagtacgggaatagaacgaagccatttgcccttaccatagtttccgtgataaaggcagacggtggaggactgggcaggtgtgtgcacaatcgaagggacaaaccacttgcatggggatctcccatgtatattagggttttggagtgggtgtgatatacctcggcgcacggacgcgaatattacaatacctttcaattaaatggtaattttcattttttgactgcgcttgtaatgagacggacgtgccctacttagtattagtagttcatgaatgctccatacccgacgtagcgaagtgtcctagcagccaatcccacctattccttgtgtaaacatccttgtaataacgccccttgccttctttgcaaatttttaccagctactctcatgggatttacaaattaataagtgacccagaacgagctagccctcagtaggcaagcatcacaagtttccccgcccaacaccgcggagcatgaaaggctctcataagcaagggagcgggggttcccctttacatcgtatataacccccatcgccgcttgatcttcggccagataagaccgactctctttattcctagttgcccccgaatcatcccaacttcaattctttggaccatggcgattaacaatggccactggcttccctgcctggatccacaaccttccaactcccttgcccctggaccaagtcccccgtcatatccgcttagtaggagtatcattaaacatccattcgggacaggtatgtccagcactgtctgggtccaagttcctcaaacccaagttacagggatataaatgatgctaatttgcaataagaaaggggtatggctgatcaatcttatgttcaggccaactgctttgaaccacagccagcctcgccccaggcggaagcacatgtcggttttcattctcatggcaaagcaataatttcccaaaacatagacgaatacgccctcatcaaccataccattgggttccatggccaggaagcatttagcaatatgcagaagtcatacaagagggtggccatgccaagccaagctgtgcaccagagcttgaagtgaggaaatattattattttccgtgatgaatatttatgctgatatatgagtttgtgtaggacacaaaagcataatggtcccaatagttgtgtgccccttcaattcagcagcctccccgcgaacgacaatacggcgcgagggcttttatcaactaagagcccgctgccttctactcattgcaaaagaatcttccccgttgagtctgacttcttattgattgaccaatttgtggctagaaacaatccagccctggaaaacatactttcaaatctcaagcgttgcgatgcagctctcctggagagcttctatcgatctgccttcgaagggttggacccggacacatgtgaagctattttgcatctatggatgagagctttgagcccaaaggccttggttgggatccaaaacacatatttgagggaactgacgtatcctggtttgtgcttccaaaaacccattacccttacccggactgaccattgaagatacacgagaggttctctgtcatatattgcgcggatgccctggagaggaaatcccttttaaacggcttctggagacactacgcttggttagtatcgaaggcaagaaaagagtggaggttgaaacgcgtttactcctgcgtgagattgaagtttggagagagttataccagtaaccattttacggcgctcgcttgatagttacgttttactgagagatcctgtatatttgtatctcaccatgtatagctgaatgggtgctacctatcagtgacggttttgacaaaatgaatcgtggccgtatacattaagattatattcagaaatatgtagtttcaaatgttgacgaggatattggcgcaattccaccattctgttatatacctggggatcttataaagtagaccaaagcaagacaaaaacagctacgtgtatttttgttatccattaaccatactctctccttccacagaaatctcgcaagaacgtagcttcatccatatcaccattgatcaaaaatggtcgatggcttccgtaatcacggtagaccacggtttcgctcgtaggacctgcacttccgacgagaaacagtcacatgcttgtaccgccaaatgtgcagtttttgaaggtatacgtcgtctggggcttgcgatcgacagcctttctcttttcgcgacagccgatgatgtctggtgcaagtcaatatccaagccacatatatagaatgcgcgtcatgggtacctgggtgtctcaattcgtcggaaccggaaagcagatggggtttcgtgctgtgcgaggtgcaggtcacgcgtaatgaattagccacagattatttggagatggaagggctctcgctgggaccttatgtacctggctcgcaaaattcctcttgatgtcgaaattggcatagggttgacctggaatgggccttgtatattgattagcaaaaaagtgcaacaggagtctttaggaaacagttctaagcacgagggtatcataccgtagcaatcttctctggatgtgactggatacttcaccatcgaggcattgcctggattggggttgacttgtgattttgcattctgaggcccgccttatagccatttaatggtcatgctgaaagtaggtgagactgaatagagaaaagtcagaagtgcttaggaaacagggctcgttgaactgatcactaggcaaatgggatgatgaagagagaacagaatgtgatggggaatgtatcgactcacggccatgggtaaatttcccctggtaataatgcttaggtatggcttcgtaatttatatgcttaaaattcgataataacgctccgtgggtccctgtatgaaagtgtctaccattcacaaacgcaccatgcaactagatgcggaacgggctgtaaaattgctgcgtgggccctggtaatgaggttcaaccattgaaaaagacctgctcatgcaaccgacaactaggccaaggttcagcccaaggtgctgaggccagttgcggctacctcggaccacctctttcagacaagatcaaacttagtcctacgctacctccgaatagaaattctcgcataacgctagcccaccttcatatttttaatagcatgggtctatcctattttcctccccggcaatgccgaaccatcatctttgttcttacacgctatcaacaccatgcatggttgagaatcccttgaagcagaagcagctctttcactaatatacttgaagtgcgggcgtcccgttaaaggagcctccactccggatcaacatgagcactcgagatctgttctgttttgagcatatgagttacaccagctcgccgcaatatccttcggggtctcctgtgggaatggtcgacagatgttttgagactggatctgaaaacaacgtcgtcgacgaaggacctcctccagcaccacttgcgctctctacgtattccacacccccgcttcctcccaaataccgcacgatcaagcctcgattcagtgatggcggcttaatgcccaaaccccccgatgacacgttggaagttaagcctcggagacatcgaaggagtggaacgcgccggaatcgccaacggcagcaacaagagaaaattggagagcctaatccagtccaacccgaggcggaagccagcatggtctcttttactagacccaggagcgagaggtttgaactgccaaatcatctgaaactgccatagatcctaaggctaactcaacgactataaaatttcagttttgtacccgtcacccaatatacggattccgacctgttctcgaggagtcaaggaccttctctcgcaccttttttattctcacattagaacgatcttacaagcccggcggaaattcgatcgcctttattccctaatattgcttccgcagctcttgtcgtcgaccgtccagcctatcaccatgatgtgcccagctcccttgattcgtcggacattcaggtttcaaggccgaattccttctttgagctaagccaggatcgagattctatgagagcagcttctcttcaattctcggagcatcttgaaaagaccaaagttctgcaatcgttgagcattttacaggattatatggcgaagtatccttcggtctttgaaaaacaagcccctgagatggtccagaaatggatgttggacattgaaggcgttaaaccaccagggtctttgtccgaatgaacaaaaaagcggaaacattgatgttctcgtcctaggttgcatgaaagatatataatttaacaagttgctcttagaggccctaagatgccaccttcgtacgttcataagtgagacaataaaaaatttgctttgcctttgtaccaatcccagcaggataagttccctgcatgaatgcagattaccaaatattttgcccttttaggctgaatgaagatgactgtatatgaaacatgtcgatgagccttaggtggtcataattatctccatagccaaaaacaacggaataacgatagtgaatgaaaggagaaatgacatcctgcattaaaaacccgttcattttatatccggggggcatacgcaatattaaagaaactagtgaggcctggctgatgctactgcagcatcatcacagccaagctagcacttatcttttgtagcagtgttcagacctatccctgaagcaaagctgaaggctcgtggcccgacaatcagggtcagccgcatgacacgtctgaaattttcattctagcacactgcatggcaggggctatgttcccaggaatgaacatctagacccaaagccactgtaggctgccgtcatagaaagtctcaaccaataacttcgttgtgaccaatccagaatattacgtgtcccaagggggctagttcaacctgacctggtatcgatcatcacaataagacatccagggtggataggccttttctaatcaatagtggaagttttatataaaatccactctaatggttctaccacatcatgaattgcagttaaagacatttgttatcctagcctaatcattactttgaggcaatatcgaatctctggtatggcttcttgttttgctgaacaacaggattcgaagagtgcgagctaaatttcctcaggacggatattcacttcaaatccttcttcaaggacggctaaaacaagtttcattccaggcttggctcctgggaactatcgaaaacccaaccttggtaccaaatgggttcacgctcgctgtcttccgaatttcaaggtgagttgacgactaaggattttgaccaaattttcatacttatcatcgaagcacaatacgcaaggattgtagaatgtgagagaaagtgccagtggcttgagcaaagccgagccccatccacagtacacctgcctagtgaccgatggtggggccttatcaccctacacttgagtttgcttcacgagcatgaacaattcttcgtcatgtgccagcatccatccgtcagcctggatgtcaagaatgttcctaaaaaatatgagatgtctgatcgtatgtggcggtatgggatctattcgttgttgaatatcctacgacaaagcctcccagggtctttgaagtacatgctctgcttcatcgaaacggtctcttcgattctgaaacggttgattctgtcgaattcagagcttggggactcgttgttcgaacaactgggcgatgtggctcgatatggtatgtttgcggagaagttgaatagggaatattggaacgttatatcgcggtgttggtaccaaaaggctgcggaccgaaatcccgatagcggacgaatccaacatcatcttggggtcttgtcacaacctgatccgcttcagacactctttttccttaccaaagctctcatcagtgcgcagccatttccaggcagccgggtgaccgttggccgtttcttcaatgactggcccaatttggcacttcaagaaaattccatggccacctactttatcgccgcacattacgtgctacttcgtggcgactccactgggcggtttatgacttttataaatggattcttgtcgctcttaccatcgtacatggaacaccatggtcaccaaagacaacacacagtgtacgtcatgtcctgcaatttcgcctctgtattcggttaccacaatcctgcattcatggctgtgggatcttcccaaagccagagtggacatacttcccagacaaatgaatcgggtccagccaaccagaagcaagcatgtgtaagcaattgttcgatcaaccaacctgcatatccaactaaacaagccctacagggagtccatcttacttttcggacactctcggtccttcttcagtatagtaacggtcacaactcagtcccagcaatccatgtctctctagcctttctctggggcctcacctgtcatcaccctttcatggagagtttggaggcgagggttccttggagagcaatcactagattcctcaatagtctgatcacacccaacgatgattttccgaagatcgaagacgcgtcgttcccagctgcagacgatggagcagctctacagcttccagaagatttcttgatacggggccaaacttggagtcaattatattacccaaaggggtttttcaatggatcaggcgacagtatttcgattgaagtggacagtgaggtgaagataagaagatacaggtgcctctggctaggtgtgcaattagcaatggtaggttttcatgacttgaattgtatctacttcacggccacggacgaaatggtgctaatgaattatatagtccggtccttggatctcttacattcctacaaagggattcaattgcacttgctagtaaatatgttagcagacagtcatagctattacagagcaccctgaagctgagataaaggcaaactaattgggatgaccccacgttgcccttcattcccgccggaggacatttaggaaaccactataaatggcccattgttcgaagacaaattgagtttttatcgttctccccgttgtactatgatagatagtagattttagaggaagacagccttgcatatagcgtgtatatgagataacactcgccgagcatagataaaaatgtgatagagatagaaaactcgggaatttgtagcatcttagtcggcgggtttcttattatttacgcaagcataatacctgtctttccttgccaattacatactaaaggtatttcgtcggacaatattaactcaacgcagccgattgctacgcactgaagactggtcacggttagatcagaagggatccgggtccactggccttacactcctcatgtttcaacgtcaagatctgtctctcaattgtattgttaccaaacaggccttactgcaggtcctttagtatatcgaagaatggtgccagtagagctctgaatagatgtgtaccaagctattggtctatagtatgaaagaatcatgccgaacaatgacaaagtaacagcgcaatactccaacagataaccatacgaacagctgaatttctcatctcgtaacaggtgttggcacatggagcactggataagatcgcacggatacaagactaaagttcgggcgctttatatggaaggctcagaacagggacggttccatgcgtcaaagtaaataccagatatacaagaccgcatcgcctttgatcacgtgccattctggaaaccctaataatcggctcaaatttctttgaaagtccgccagcttgagtggtactatctaaagtcagccaaagttgagtatttcatgcgaaattatgtttccatgatatattccctgaaagcataaatgagcagcgcagttgtatctgacgctcaggggttattacttaaaagtagccctttcctgtgacattcctacatatccaaatgtcagacaaatagatcacacaggcgcgtaacttctttcaatcccctttcgcaggatcctcacaatcaccgagacttgctctacaataacccaaagcttggcgtgccatgaatttgtagcacgctcagtgactgagatttcaaatccgacatcatgcaaaccaggctatgtccaatttcattggggtcttgccaccaaattagaggatcctgggccattttggtaggcgagaaagtataaggtgcagacagcacatgcggctatttatgaagtggctcacccgtacgatggtaatacatttgctgcgccaaggatgggagcggagggccttggtaccgttcggcaccgcctccctgcaacatgtgaagcggatagtgaagaagacaggttgggctgctcaggaaggacgctgagactgatattggaacaattgcttcgggcctcatgtcaggatacgcgggaccactagtatggggtgtgaacaaaccgcctgtgtgagcgcttcctgacacaccgctagtttaagaagccccggattgggaattgggcctgcagaaatgggatggtctggtgtttgcaacttgggagttgggcgggcaatttgggtccgggttttgtatgtaagtgagctgggagttgtttttgggtgggatatcgacgtctcgcttttgagactgcgatgtgttctgcaaatctgtgcgcattcccagttgtgcaatgttggcatctgaaacatcaaattggcagtgaccgctggttctcagcttcttctgatgttccggctgaccgctttgagttatttgagaacctgccagttcgtgctcaggggtaagctgattggggtgcccttttcacctgcaagtgcaaatgaaagcagtcagcgtgggaagcaaagaaaaaaaaaagaaaaaaaaaagtggctgaaaaaggtcaggtaacacatagatctgattatcttgaaagaggctagtgactatggcggacactgcattagaggtgagcttactctggaacccttctttctgtgacacattttagccatctctcctctgcccgacacacttttcttttgatgctcgctggcctccttgcccattaggtagagcgtctcgctcattggtctccggctgagcagttgaatttggatcagcgggatgaacgttcccgccattgattgctgtgaacctggatgcaggttttggcgtgatttcaactcggtggcgccgatttcccaacgtgggggtatcttcggcgctgtcgggtgtccaacataccatctgtccggaagcggattcgggggcaacggcagccggtgaactttgatccactgtttcgtcgctctcatgtaacggtggagccatatcgcgagaaaatctgtctatgttgcctaggatctgtggctgagtaaggtgtcgcgatctagatcgctccagcggtggaggcttgagtgtagtattctcattgctcggtactgctgcagtatgcgatgaatgcaagctgggagtgtcggacccaatgatggcgttgggtggtcgtgataccggcatagtattgagaacgggagcaagcggagttagtcgacctggagtgggggctgaggttacatccttatggcgagaatctgcctttctctttctgcgacaagctgtaacgatagcagaagatgatcgatagtggccaaagtctctcagaaactcaacttcaagtctctcctttggtaggtttttccgtttcatgtgccaccctagtaaacggttcaggtccttatggttccaattgggatgagaacgcgccgcctgtgatttagacttctcatggagacatcttataatcaattcttcgtcaatgaaagcactttcagaggcatcaatggttggctcatccattccgcagttttgagggtgatgctcagtggagttaccagtggagcttggttcaggaacttggaagggcgttggtgacctgggcacactttctgtgtggctttcatcattgaaacccacattttctgaacctctagtcaatgaattttcgcgtgatgaagattgcggagaaagcgtctctaatgattggttgccatgtgccgtgtctgcctgctccatgtgcattgtactggtctcagcgcaacaggaaagcgtttggcctagccattcgagtgtgatatcgtcttcagggggatgccggattggagattggataggctctgatatccgagggggttctaagggagagcttcgtggcaagcaagcatcacccatctttgatattgcggcgaagacattggttggattaccattccttagctgactttcgcccaccaggtctgagaaacctggatgggctttaggcgattcttccgcctggcggcttcctcgaactggcgactcattttgacttgtacctgactgaggttcacgctcctgaggggcgcgctggcaacttaacatttgattcgcagtatcctgttcaggtactgcatgtagatcgctggtttctgtttcagggtcaaccggttgaacaccatgaaggccgtaagaatctccatcctcgcagtcttcagaattcagatatggaagcaggttcggggctaaacgcaaaatgtgaacctcgaagttcgacctcgagatcatttgttgggtggaatccactgatccagaggcttgaaccgctggtggggaggagcgtggtgtcgaagacacaggtcctttgcgcaaagtcttcttattgcgcttcctaaaaggacttttaccagttaggaaatacactcttgcctcaatagcatggaaagtccttttttgtttgaatgttccgtgaaagttgcgtgcaatctcttcatgcgactgattcttccgtacttggtcttcgaaccatagaggaagccgcttcaatacttctgcaggccaagccttgtttttgagaactagtacatccaaattattagtacatttcttcaacctcttcagtctcaatgccacgtttcttatgtgtattactcacagttccgggttccagcaccgcgttttgaagcactggcttgcgcgtctgtcctttgagtctcgatagccatcccctcgagcgaaccagtgtcaaactgcggtggcgtagttattgctggctcttcggctgatcccaggggaaagggcgagcccgccgatctttgaccttgctccggattgcggcgaagaaatcgatcccttcttagtatctcctcaagcacagtgttattggctttgatgactgcgaggtgacgtaagcgagtgaatagggtaaatataatgtttgagtgggcttaccgtccgatgcaagttggttcacccgtgatgccatttcggctgccagcgccaaggtatttagttctatttgtacgtccctttcgtaggaccatggttaaatcagctttcgaggtaaccctgaaaggatcatgttgtgttggaaagcagacaactggacaatcacgccccggtctcgcatatggaaatggtaaattccattccctttgtattcagcctcataatttctttccttgacaacatcaagccagttgatattggcactggcttcgtcgttgtggagctgaagtacacaagacttcggtgcttcaaacatcacttctattgtcttcactagggcgtcgcttatgaggggaacgttcaagaacccagcaaagctctctcgccccgctaggggccctgaaatgtgaccgagaatgctgaaggaccaaagacagcttatcttgaaaaggcttaaaatgctcagaatacacgcttttcatttctggcagacagttcagtatgcagtcatcttccctaatgttgcggccagagccttcaacagtgacagcgttggtaaccatctggaatgtgactcgatctgagtaaaatcagttggaaacctgtgggcacatagagtaagaacaaattgccgaagactgccgtgtaatcgaggacacacgtagcaatgtgacgacgtttcatgaaaaggagattgtgatgtccggatgctacgcagaggccccgacagcgctagttataaatccatttgttgacatcacgtgtgtggacacttagataatttatcatctgcccagtagagtatatattaccactatattaattggggggcggtttttttttattttttcttcccctccgctccgtggatcgtgttcaaacaacaataatgggtggtaggtcatattcctgcgtgtctaacatgatgccttggccggagtaaagtacacttttagtgggaagctcgaatcccgaatctgacccgtttgaagcgggatacactaatcgtacctgcgtccaaatggttatcaaagtagaattttagtgcgggtggttttcttgcattatctcgcatccaattcagagaaaggagatgggagttactgattgagcggggatccgagaataggtctccggccccacctcccgttttgctttctgttcagactagaacggaataaaatacagagtctagccaatgagactaccgccgccaagtgcggttgggaaatctgggtttttacacggatgcggctagtgatgggcgcgttaggtacagacgtcgtagatcaaaacacgtcattactcccaccgttcatgctcgtgagacttaaaaggccgtgcattgatcaccagagccggataatcccgcaatcctctcagtgttgactccgctttgaaatcgtaaatcaagcccgcctgagacagaaggtcaataataacccgaatatacccatgatataacagccatattgtgtggaacctcattgtttgtactcacatgagcgtctggataatttttggttgtgttcaacacgagaggatcattattctgctaatagccatatttgagatttggttgactaaaaatgatagcaaatgttgccgtttgatcaccccgtatatttttgttacgaattttgaagaatagttgcgtaccgcagatttcaagggttaatgaaagctgttcacagtaatcctacacgtaccaggcaaaggcccgtctttttctttgctggcagctggttcgtctaatgcgcagaatgttcctgatttggggtttgtctgtgattagggaaagagtgcttgcgttgaacaaatggtggaatcaccaagcctgatgaccagcataatccgattaatcatcgataactagttcagattttggccgctcttcttgaccactcctcttaaccactcctcttgaccactcttcttaaccactcctcttgaccactcttcttaaccactcttcctaaccactcttcttaaccactcttcttaaccactcttcttaaccactcttcttaaccacccttttcttaaccacccttttcttaaccactttttggtagaatcaagatcgcactctgtctaccaaatgtaattactgctttgaggtgactcagcatgcaccacaccacacctcatggggacatatcctacttcagagttcttttctgtacaagtacagtggaagaatttttaactcttccgatgcattgaaataaaactaaaccaaagcgcgtattggtggacagggttggctacgtcaatattgagtgataaacaattatctaggaacattgattcggttgaaatcacactttttacgtctaaaatgtcaaaaactcgtcttgtgggtgcatagagtaaagctcaagatgagattctatgcgcaaaccaagaaaataagatagtaaataagttctgtgcatgtcttagcttcctcgatatcgacgtatgatgatcgagtattggtccctggcaccacggagaggtgctgcacgccgccagagggagcacaaactttacctcacggggctcagggcaatgagggagcacaaaatttacctcacggggctcatggcagtgagggagggcaggaagcctgctcctactctccaaagtgggcgcgtagggcttttttatccgttcccactacgagactcgataagtaccattaacgcaaccccagcctcgtgggaatgctatagtatggacgcgcagtgaagatgatgatgtactcaaagttatgaggtaaatgatttcacagtggtcagccaagttcgtgatgggtggatcccagaccgataggtatccactgactaaaagtcgggcatgtgaatcaaacgttagactgccctcataaacatcttcgatggcctaagatgacctgttcaaatggttatctcgaagtcaacttgctacaacaattgcgtgttttgttgaattacctagtatattaatggcgtattgccccgattccccgatgcaacgatttctgggcgtgtgttgattcttcctttacctaagctggctaatgcaaacaaaataaggaacggcccatgaggatttatcctgtactgccctttacgtttccaattttcattgttatctgtttttgattttttttttttttttttttttttttttttttctttttttcttttttgccgcgccggggcccctttagtgcctgcagtagtgcgaatccaccacgcgcacgaaatggcgcattcttccacccacgttcctctctttccccgacctcctcctcgttctccctattctgaagtttcctggattttgtcacgttttttcaatgtcgtacgcccaaattctacgatccagtcgtcaaccaggtggttacgaagcacaaatcgcaagcttgatgcctccagaggaagagcaacaacaaacaagaataacaccgtttcacctcaaaggaaatcctgatctaggatcccgtgccaagtatgagaaaggtaccatcatttgtggtcaaggcccacgcacaggatgaatggtggctgaattgaagttcacagcagcacagcaatcttcgcggtcaacccagcaaaaccaagagtgagctcctaccgtacattacagtggctggccttttgtgctgactttgagattgacagccttcataagcgagtcaagtgagttccacagccttcttagtagtttggcagatccctactgcggtaccttgctggagtcggagcctgctttccaagtgagcaaatcaacatgctaaccagacttataggaaaatcgaacactttatcaatggcattactcagaatggctttgccgacgtattgaccgaaaacgcgacattactgagcgaaaccacagctctcaaagacaagatccaagaattagaggaaacactggagaacatgcaagctcgtgtagatgaattgtgcaaggaaaggcaggtttctaccgtccagaacaacccagcacgcaagaaacgggcaatgccacaatgaccttgctcattggctctctattagaaaggcgctgctctcacctccacttatgatttatattcaagatagctctttgaatatattgttctgtgaaatttccgggacagttggcaacactgtcgccagccaagacgaaaatgctgccaccactggtgaaatgtaaagaattatttttttaaagtacttttctaaagtaggcattgattattaccagttcatgtctgatcttcagtcattttattcggcgaggaggcacacggacagtggggctctgccaatgtgaaccatggagctgcttgtgccctgtgcgcggcggttgctgatacttgagttaacatcattatcgtcgtaacacaatgccgtgactagcaaatatgtctaggttcaggtatttgggacaacatgggaatcacgctacgttttcttcggcggccaatatagatcgatctcaaacaggacgaccgatgaaaagccagatacccagtgtcaatattagttatatatacagagataccttggaacatgcaaggtggatgatagagccatctccattgagttgtacatagaagtggtaaacattgagaatcataagatctcagcattccgtgacgctctcatagcagctgccatacggtgtacaaacttccagtggtacgaaatatgtcgcgagggtgcggacctcagagtgtgtggcggtcggatcgtataacctatcgaatcattagccgtcctgacccatcgccaaggctgccgctatatcttacctggtagtctctcgtttgcgttatccgagtcattcgtcaggtggcggcgttctgaaacagccagctgctctaacgcatggatcaaaaggcgagtttttgtgcgggagcctctaggtgcgtagattggaagcgacggcaagcaggacatccgagcttcttcgcgttggactcgtaacgaaactgcccccgagctggtggtctcagacagacttttctggatggagcgatattcccgtaacaggtagttttgtttgcaccttaatacctcgcccgttcgtttcacgccgaactgcctgaggtatgccctggacctttccttccaagacatccttcggtgccgatgcaaccaggaaaggaggttccttttctcccatgaagtccaggcgaccttgtttgttttagacatcctggttctaggcatttttatgacaggtaagccacagaattaggatggtagtgaaaggcgagatggtgcaaagatcggatgcagtaaaaattgtgaaggaagtcggttgaacttgggggtgtcacacgtttatctaggacgggaaagttctaaagcggtcttgattaattgcggtcttctgttacagctatgagtgcgggcttgctcgacaagaccctagtcgaatagttctccaccagatgcatcctgaccctggtcgatctttggcctctgtgtagattccgagggagaatagtgactgcgaatgaggaaagtgttgtatgatgctgttaccaggttgttcataggctgttctatttggcggaagaggcctgcagttttgtgaggtcaaagtggtcgtttgtcagtacactacaccggttgagaaacggtcgatatccgaggttatctgccgccttcgggataattattacgcccagtcatactacggttaatggtaaaatataaataaacgtaataaacggtggtatatagttaaacagacgcaaaacaaaaatggatatgaatataataataaaataaaacgataaaatttaaatccggtggggcgtggcacttggggaaaggatagccatattcaacggccatgtcacctgctaaacttaccgtttctcttttcttttttttttttttttttccctagaggtacattcggagcttgacatttgtgagtggaaatggatgaaattactcaaaccttattaatttgtaatatagggagatactgagttcaggtcctcattgctaggcttgtttgggtacggtcacttttcacttcgaatctttaagggatcaaattctcccttttcctaccaccctccattctttatttcacagtttctccccgaaccccctgcttgactccaagacagttgcaatgggtgaccggagaaattcgcagcggtatgtagaccgaatgtctcaattgctttcatcgggctcaccggagccaaacaatatttggagcccccccacgtcaatcgccggctctgtagacgatgattgccattcccaacagactgatgaatccgacgacgatagcaaggctgccttcatggatagatgcagtgatgaggagggaactcagggacatcaggccaaggaacagacaaaggaacgggtcttgggtggagccagatccgtaaagtttttgaatcctgagtattccgcagagtcaattgtgaaaatgatcgaatgtgtggcagagtgagtctgaatctgttgtcttatgagatatcgcatactaacggcttgattatagattagatgggcgggtgcagtaggtttcccttggagacaggaccagaatcccaacactgacacacttcagatctgatgcgaagtcgctcaagggccaggaccggtggaaccagggaatgcagcgaaagtatatagatatgattggttctataaacacgttgactaaagaagtggctacattgaggaaacaagtggacgttttgtcgagcagagatgcagtcaaaactcgagaggccgtgggctcgaagcgtcaaaagcagtgagacaataccactatattccatagagacctaaaacgaattatcaagaactttgttttcacgtgaaataatcctttggccttctcctagcggttacagaggtcacatgtcgccttcgatcaagttccgcgccagaaccgcaatttgtgacgtaccatgataacgatttatcaccgtgggtggggttcagtactgtagttgatcgctaataatcgcagacagataattatgaccgcgatgctcatttagacattgatggcgtggtctgtaggaaaggtctacgatttgttcggggaaagctcagtcgtacccggatcgaatcaacctgactcggttttcttggcgtatccaccgttccctgcagatccacgcacgaagggtaattttatcattttcatcaatcaagccaatcatgtcccggagccacaatgtcgcggggttctacggcaaatcagagcgcgtctgtcattaaattttttttaccccaaaactattaccacttactcccaatgctccgccaaatttcgtcgcttgttttcataggattgatccgcgcttccgtcaactccatttcgcttgcgctgcgatgagcatttggccgttgtggggtcttttgattaaatcaactcgaaggcggaccgcaggtcaatatgtaagtccaaaagggcctagctcttctcatgagaaaagcatacgattacaaaatagtctcggccattgattcgtcccaaccgtttattattacccgatcagcgttagccagaggatccgagctagcatcaaaattagccatagccatgcgtgccgaggtttccgcgctaggcaggggttgaattccaaatccattagcgcaatcaatagtataacccccgtatctcttgttcacagcccttaagactggaaggcgtgatggatgaagtcagtatatcagtggtagatccagaagatcatgtcacatggactgtgcgctatgcatgccatgggacgtaagaagctcacgtcccgtcccgacaagggccgggctgcggcccggtttcgatcgctttgttttttggcgcagtgaggaactagtccaaatgtggttagaaacaagtggttgaaaaaaaaataataaatagaataatacctaacccaggaagtattgacggagacatgcacgacgtaccaatatgcgtcaacccaatctttcaagtgtccttaattccccagtgccattctaatgtcacctcttatgtggaggataatccacgaacagcacccagggaactgaaggctacctggcctgatgaaatcagcggtgttcaatccagtctgaaccacggtcgcatgcagatcacccggcttatacgcaattggaaaagatacgtttagagtgcaaaaagcgttgcgatttgcccggggaaagctcaatgtgctccaccatactgcggatcgggccctggtttggtttccggagggttcccctgaatccgatggccaaaattgcgtcaattgttctatatcgggcagggacatactgagacggagtacattctgaaaatcctatttccttcaatcaactgagcaatttcaaattaccatattcatattattatcgcataacaggcggctatagtctcacctagtagcatccctcaatcgagataacctccacacaagctctccaacgtcccgccattggcttcaaaaggacgatttgcggatcttccaggtcggcgcaaagtgctgatcaatgaccggctctgatcggctcataaatctgcccaagcacaatggcagtagttcagcgagatcgtgacacttggactacgcgatgcctaatgccccgtgagccagacactagactcaacctagcttaagtcgaaaagcctaggccatcgggattacgtatgcacaatctgataaagtgtcagaataatcgcatagtcgccgttttacgaacttgtcgatacttcaaacgaagcactagtcaaaaataagtactatagacgagtgtattacggatgagggggaatttgattttcagcctaccgtcggactaacgtccaacaatgtcggctaatggcaggcatctctacggctttaaccacaagacatgaaaccgatcttccgcgctaatacatcctaattcggagggccaccataatctccgccgaagggccgttggccggatgagattaaatggagaattgtacaagcttgatctgcgcgacctaagggaagagagtgtgaccgtgcaatctccggtctggtgtattgaatactggactatacctgtctaggtggggtaatatatactacataggtcacggactacgtagatgataatatttgctgattcatgtcctctggctagatgaacaaccccgtaatgcctccatgatagtacacttcctctgcaaaccaactcaacttctagtatcttcaaaactgcggtatatattggctagctgtcgggagcggttggtggttggcttgtgttggcgcttgttgattggtcaacggaagtgaatagctttgaagcgagttggtaccaagcgaacccatctggccgttatacaccggccaggaaggttgtagcacatcagaagcagggaagccagcaaatgtaagcttgtttttctctgcggttttctctgcctctatcttcttctcgagctggctctgcgcatattgaaaattgccgctgacctccagtagtataggcagcagattatcaccggctgtgctaccaacctgtgcaacctcgagttgttgtttcagactggatatttggaactcaagtttatgaatcttggccagattctggtcattggtgtcactcagctggcgaatctttgccgtggcttgggttttgtccgcctctagtcgctgtattgattgtaagagctcatcccgctctctatcagcgtccttgaaaccctgcaagcatcgccgatgaatgacactccagtgcttttgtttagaggccttcgctattggcgaggggctctagcttccacattcgggtgagtacttgctttcacgagatcagtaattaccggacgtaccaagggtgtatggagggatgcaccttgggtgtctgacggagggccaccatgaccggtggtaggacggcgtcgagtccgtttaggagcagtatctgactcggaactgccatgaccagcatcagctggggcttcggatgtcgtcctacgggaaggcatatcgagcgtcagcacgccgaaaggggtgtctttgcaagatggagtgagttcagcattgaccgttcgggtggacaacgttggctcttataggtctccggcgtacgcgccagtagccagaacattttggggttagtcccctgccgcttaatctgcgccgcaggattgcgaggttggcggatcggatgcccagtcattggtccatgacatgacaaccggcccgcaataatggttatcctgtaatttccacactatggttacattgagggtcggtggtcagccgttaaccatcacttaaccggtaggtttctcaacgatgaacttgcttcgtcgtctataattccgcagttaggttttgaacattgtcgggacggtgtactctttctatcagtaggtagcgctcattcacatccccaataaacattatcattgaaatcagatcccggtctcattcaaactgcccaagctttgccagaccatgcaatttcgccaagcacccgaccgccgctatccgtgtatgttagtgatctacctggtcttttcggttactctggacggtatactttggcccggagttcccgccgctaagtactcgaaaagctctatcagacagcgcgtatcgcgctgagcaggaactgataggtaagccaaatgttggttaatttccggtttactcactcctcccgatacatcaagcagtccatcaatgatcgccaatctacagtatggtacacgccgtaagatatttgcggcaacagtagtggatcatatgccgatctacgttcgtaaaaggtaggttttgggcgatctgtgaatataagagtctgattcgttggacctcgtaagctactccacattcgaatcagtcgcgactcaatagtgccgccactcaaccagatatcgagaatgtattgtgggttaacatagattcatccctgtcgcataatttccgttttcccgtgattagaaatcatataccggggtacgcgatttggctcagtctcgactgtgtggcacgcgttaagtctgtcacatgcggcactcgttctttctgttgtcgcaaaggccaaggttcccttgatctctaagctggctgtgtttactcgccgtcagccgagggtatgctatcagtttggcttgcatagcggtttctctgtgaaaatgtgaaaacgtgctacgagtcttgggttgacagtgtatactactccaatcttctttgccatttccgtcctagccggtacataggcatatcagggttggagagcacgaaaagtcttgctacggtcacaggcgggaggtatataaggcactgggtgatttcatcgttgcattgcacaatgtagacctcgggttctccccgccgtttcaaacttgggccggttaaccgtatatggtccaaaagagttcaaacggaccgttcaagatccgtaagatgtgagcccattgaaagtccaaggaaactctagttggggactgaatattgatatagagctatatatacaagcccaacctccgttgctcgagtaagcttcctagtgcttccgtcagacccgtctcctcgtgactccgatcaagacacaacttagtgcctgtctttattctgatagaatggattcctcggtaggcttactagacccctttcaagctccatctaactccataataggaatatcttcgactcctcgcgaggctcgacagtcgggcagtccgggcagaacgagcccagtccaaacttgaacaagaattgagcgcctccagggctgccgagaagcaagcgacagaggagctgggccatgtgtccagattagcggatattttctttgaactcagtcaaattctgggcggcgtggtagatcattggctgaaggagcgcggaaccaaagaacccggccaagagccggagtcaacaaagataatgcttgatgtgttgttgaaacagttggaagcacaggagttggccaatagcggtggaaattccgatgatgcctcggaaagcggtgacacaaaggcagcggcatagtgcagctaagtcatggctaaacgagagcttaccgtgcatcgttccttgttcgtgtacattggttattgcttgtgaaatgactgggtttgtttacggcttggtcgcgtgcagaaccgtcgtaagattcttttatctactttgctatggccgttcaaacggattcgtttctacatctgcccatatatgtgccgtcgtattcttagttcagattacaacacctctttccttgaagccgccagggttacatttcagtttgtactaattatggaaaccaacagattttctgtcgtgctcagaagctgacgcgagggcttcaacatgttctggaagacgacccttccaagtataccatcaccgaatcgctaccccggactcaatctgccgccagactgggaaatgcattcgaatgggaccgcattcgacgatcggcagctccatcgccagaattaatttctaagaaattccagaagtagaagatgcaaccagacagctctgagctcgatatgcaagtccaatatggatatctctctcacatcaatgctgaatcatatagcagagggctattgttgagatggtgaaggggctgctcctcaataagccagaatacatgctcgtcgttggtgggaggctgggacccgggacaaaaaggcaagataggggcagcagagtggggcgtgtcatggtttgttttcgttcgtagttggcggccctgctggaaaatagtaaggcattgtcagaccaaatggttataataaaaagttctgttgacgtaccggccgctaccattcatactgcgtggggagtgtgtttatcgaggattgttgtcgatttcttgtagcgtgtgaaagccggtgaccaaaaggtatacgctgactgtttgtgcctattatgtaggacatgctagtcggccagccgtgtgccggtaaaacagactgatggtacccatcttgctgagtttgagtagcttcctctgtttgactggcctgggcgtgtaaccggtccatccatctttgggcgcactttttaggtcgggaggtataacgcctgcattctgcgcatagcaaataccttgcggcctttgagagtcccattgcaggtgaatgaccggtaggaagatcttggaacatcttgaggcatatcgctccatctatccgtgaatccttggacacaagattttgacaagggactccattgtcttcagcccatcggcactttagatgatgagtgggatcgccaataatttggccgaggagtgattgaagattgccagagctccagtgcatattagtggagagtacagaaggatgacaccaaaggaaaggagatatctggtcagagaaaatgaggaatcttggtaaattttaagggatacattcttcatattaataaggtgctccagatggacagtgaaatctctcgtgaaccggacggtcaaagcgtctagatgaaggagaagagtcctaatgacctttggtttatcaccctacaatcgaagcttctatgttgcacatgacgaacgcttttcccttctcctaggaaagcaatacaggttcctaggaacacgagggtccctcaggacattccacggacttgtatgatagagatcaatgttacttaagcgcttttatagccaataggtgtcgcctttatcaacggctgaaggctgctaggttcctgggagcggaagtctggttcctggggtgcaagtatgggcttctaggactgcatgggctcccaggaatacccgtgtcgttccctgggagcacgcgtccggtttccaggaacacatattcaggctctaggagaccgagtgcttctgggagctcaaccgtctgccctgcaaagcaaagggcttctagattatcgccacccatatcactacacaacctcatgtataacagaggggtttactataaagactcaataaattcgtcgtggttcggtttcgaatcgccatcaccaccttgatacagattttaccccacatccacgtgccacactcaagatgtcagacccccaatggctttgggatcccttgagtatctgtgaaacggggcccattagggaaactaagacctgttgtggcattaccaagaaaggagatgcttgcaagctgatagtgaagaaagacaccctcaaggaaggtcgtcacaagttgaacaacctagcacgaggcccattcaatctttctactcttgactcccagctcagcgaccttgtatcattctttctctgcaaacagtggcatcgagagcgtcagcacaatgatgttaagcagcggtggttcgatgcagccgtgcgtaatcaggccgatgtacaagaatctccacgccagcgttttccacatattatcgcggaagaaatcgacggaccgcaacaggaaccagccagcactgccttggagacagatgggtttgctcccacatggggtgttgacgcggctttcccaaggcttccttccccgacatggctagaggtgactcggcctcctggtcgggatgttacaccgggcatgctcacaatgaatcgcgtgccctggaatgtttcacgggataacccagccattctgtccatccacaatgaatacggtggactgcactccctccagattcacaccgttcgccaagagtcctgtccagatggtgagaggtgcccaatttgcttcgagggagatagcgacgatctggtcatgttgcaatgcggtatatgtaagggggtggttcatttggggtgcatggagggctggctcgcccatcgtttaccgggaaacaacacctcttgcccaatacagtacgtaactcatcaccttctaatccccagggctgtttactaatacggacacagtcgatgtaatggatcgttccgcgctctcttacgctcgtcggctgttggaaatgctaccggcaactcgacagcagaaacacctctcgaagacacatacacaccagtagaagagacaagtgtgccaacagcacctccgcagcgtcggtcaacccagactacccggcgttcagaccgtcctcgagtcttctcaagctcatcccttatccgtcgatcacctcggtcgaggcgggttcccgaccgcttcctaccctaggtttatgttccgtatagacgaaagctagtttacgaatgcacgagatcaatgagtttcacaggatcagatttgtcgtagggctatgcgcaacgtgtttagcaccaatcctgagtaaagacaaacagttcatgtttagaaaggttttaggatgcattggaccccttagattttgcggggtagtctatgaacagacatggttggttccagggccggtttcaccgcggtgatcgtttttctgacgcagctttgaacgcttgacctaacaaagctggacagccataaacacaacagccacgctcggctcgataggtcagtgtcaagctagcactgcagcggggcaaacatgaacttacatcatggcctcattatattaatagtgattgtcgcaacgtctctgggtacaaattttcccactactcaatgttgacgccttgagccatactatcatattccttgcatactatcatattacttgcagaatgaatcccataaagcgccagccctctggacctgagcctgtgtggcgtgacggaacgcccgattgggccgctttggaaagaacatctcgtccttctgcgccgtcttccaggccccagcccggtccagtgataattccctctactctgcctcttcctcatcctgcgcagcagaaaagccaaattgaagttgaggctattcagccggtcttcgaaaatccgtggttgacttacgaggcgatcgtggtgatctctcaaggacagtcagtctttctggcccgacacagaaaagacaaagcaacactcgtcgatatccaccttttgaagcagcaattctcatccatcaagccattgctggaaacaatcaaccaaacgtcacaccccagctttctaggtctggtggggtgctattgttgggaggagcaggtatttctggtccgggagccagtagagctctcggtaagtcacatcctcgcatcaagatgcactatcactgaggatgaaattgctgcaattgttcggccggtatgtactactctcaatggttgacgcgggaaagcaaacggtgctcatgcccgataggttctcggaggaattcaatatctgcgcggtcacgggagagcactcgctgccttgagtgccgatactattctactcacggaacttggtggggtcaggatcggtgagtaaatatttgggcataactggcgggccacatgagcatgagattctgatagttgaccatgtcgcagcgggagtggagcatagttgccaaatcaatgcagccgagatggacgctgccactatgaagctgtttgccttagctgaggtggtggagaggctgatcatgaagaatccttcacaatatccatggagagccgagataaaaaatctgcctggagagctgaaaagatgcgattcaccggaaaagctgctacgcgtaagccttgacctcccagccctccgcgtcatgtactgaccaaacagagcaaattgttccagcaattgggggatgagggcgaactgaagatgctggtgaatgcggcaaacaagactgcttaccacaatctagagtcatacaagcgcatatgaacgtggtgacgcgaaaatgcggcgggaatccgtcctcttgccgtttggcaggtgagaagatataattgatggctttgtactgcagatggtacagaatttggaggcaatctgcagccccatttgaggagatagcttgcgggggcttttttgaaatacagctatatattatccatattacacacacacacacaattcattaacgcccggcggctgagccgaaagggcaactatcgctaaactactatacatgtcatagtatatacaattctgtgactcattggagcccatacacaagaccttggcgtatttgtcattctcagcatgcagtgtcgcagcggatgctcgtgggttagtaagttggttagtagactggcttgaaggcgcttctccaagtgttcaacatcctatcttcggcagttgaagcgcgtccaccgtgaatagcacgaggtggttggtgggttagattagaatgaaagaggggtgatttatgttcgtcggcggggttaagtggcctcgaggcggcctgtggctatggcgaatcgtattgaggcccgtactgcctctaagtttggcgtccacttttgatcgtcggaaggcgacttccctcccaggtaaaagggcagatttcctcggtgagtgtcggtacattgtagcatatccgtccggtgtgtggtccacttccgacatcgaaagaggaagtgctccacagtttccttagcttgtccgcacgcacactgatccgtgtcggccgcgttgattcgatagaggtatccattcagtctcgccatgcccgtccggagttgggctagcacggtcgcttccttccatgacaagggatcatacagctgtcgcgtgtgttttcctgggagtgctgcatctactcgtttggcgtgctttccgacgtccgctggcagggtatttctggggactgcttgagaccgtgcgagattcagcgtggttgattttatcctcggggcgcgttcttgcaagagggcatcttcttgtgtcgcggctctagcctgttctttagccagacctagcagcttgttgtcttcactggcagaaacccagcggacttgaacatggtttccgtttctctgcaaccttttaatcaacttgtatatccgacacacgaactcctggccagattgttgtcgagggttcctgagtgtgagaaccgccgctttgttgcttgtgagcagtgcgatcgtgtagtctttcagtcccgtcgccgtgctcaatacatgtgccatggctgccagttccgcagagaatggattctgctctgcccttacagccaaggtgatggatagcgctttgtgtttaagcttccgattccgaggtggtcgcttctcgatggccactccaaaacccaccagctcgtttcgtgcagagctgctaaccgcgacctgcatgcacccgcccgcttcggccagggactcatgctgctcatcaatgtcggtttgtacgcgttccgcccacggggatagcgtgaaggggttgatcgtttctaatgtctccatgtcgatgtgcttgagcgtatcggctacgtgatacagtggtgagcggtggtatcttctgaactttctgatctgatctgtacaccggcgaagaggattggtttccggcaaggtgtggatgtctgtccacattttcacggctcgtttccaaaatcgacgttgtgcagtagccatgtgagcctccgcctctgcgacactagtcgcgactgtgagaaatgtccccacaatggcttgcgcgcctactctttggactcggttgatcggccccatggctttatccttgcacgcgtgcatccagacattggaggcgtagtccactactggtgctactgtcgatgcgaatagctgtcgcgcggttgctggggagaggcctcggagtcgccgaagctccatcgctgcttcgagacccttggacgctgctctcgcgatatgctccttgtacttaagtctcgtgtccatcaagacacccaggatcttaacgtggtctttgggtaccaccgtctgccccttgatggtgaatggctcatggtccaatttacgcatcttgggagcaaagtgtatgatagccgtcttgtcagcctcaaatgtcgctccgcttctcttttcccagttgagtgcctcgttgatgatggcttcaattccttcccggttactctgcgcagtcggaccggtcacccacgcggtaaaatcatccacgaaagcgactgctcctccctggctgtcgatctgtctttgcacgaggtctgcattgaaaaacagaaatagaatcggagacaggggcgagccctgcggcagcccagcttgtggcaagctttgagtctcagataactgcccgttgatcaggatatttgccgttcgttccgagcagaaggccccaacccaacgaagcaagacctccggtatgcctcgggctttcatcctctggatcagtcgttctttgcatactccgttgtaggctcccttgacatcgaagctaatcaagctcagcactcgtcggccgcgccacgccgcatagatctgctcctgcaggaacaccagtgcttgctctgcggaccgctgctttcgagccccaaagtggctcccccggcggnnnnnnnnnnnnnnnnnnnnnnnnnnncgcgcccaaagggggctcgtcgggagcagtccatgcgtctccaccgcgtgcgagatcctctctgcgatcaccgattcgagtatctttccgagtgtcgcaaggagtgagataggtctccatgcctttgcaatggtgtagtcatctttattcggcttcttgagcggtatgatcttggcctgtctccactgtcttggcagtgtgccctcttgcagcgaggcttgaaagaggtcgaggaccctgtgcttgactgagggccacgtcatcttccaaacgatcgccggtaggccgtcttcaccaggtgccttccacgacttggccgctgacagttgccgctctatctcctccatagtgacggctggcatgtccacaggcgctctttgtggtctcactccttcctcgtcgatgttctctggcaaaggcgggaaaaacttggatatcaattcctccgcttgctccttgtgatcgttcgtagtggttccatcggctctgaggagctgcggaatcttcccgaacgcggcattgtctcccgacttgaggtacttggcggctttccagatgttgtcgttgtctgcgagaaactcgttccagtgcttcttcttttgtttgcgaatggcatcgtggtattgtttggccgcatcctgggccatcgtttcgagccgggggacttttcgccccgcccgtcgctcggagcgagcacggtttctccagtgcgtatatatatgacggagttgagtgaggtcagctgtccaccatcgcttcgcatgtggtgatggtttcgccctcggggttaaagcgtgtaccgcttcggacactgccaacatgagtcgatccgttttctgctgtaccgtgccctccgacggaaggatggctagagcgttctgaatcctggcgttaatctccttccatggtgcattcttcagtaaaagtcgctcttggtgctttgggcccgaccactgggcgtcgaacacggactcaatggcgcagtgatcagagccgtggtctgtctcgagtaaagcacattttgtcatggagtccgtcagattttctgaagctaggacgagatcgatggtagactcgcagtctccactttgtccgccgccgtgccatgtcttggtgccgcgtttaagcaagctactgagcgcaaactcattcataaggtcaatgatcggatccgcttccccttgtcttcccagcgacacctcgtctccaccccagagttgatcgtgtcggttgaagtcccctaccatcagaatctccaccacggcgcctgtctctcgtcgtacttttgtgatcgcatcgtgtaaatgattgcacgcatcgtccaaggctgagatattgcctccttcaacgtaaaccgatgccataaagatcagtcgctcggggagcctgaccatcgctgctgtgatgtctggagactccacagggacttgctccgcttcgacttctttgttgacccagagcatgctccgaatcgcccatctcccctccctccaggtagagggcaccatctttgtccacttgtgatgccccattggagtggtcaagagccggccttgaatcctcctcgcttggggttcctggatcgctagcgccaccgcgttttgagtgtcttcgtcattcattaaactctcgtgcactgcaccctgcttcctcacgttcagctgaattattcgaagagaattattcatgacgtgatggatagagcttccggcagttcttgctgtacgattcgtgaggccctccgcacggtacacactttggaaccggttggatacagtcgctgtggcgatggccctctgtagcgcatttcgcgcatttctgggcgttcttgcactggaatgccttatggcctatctcttggcagttgtaacattgtgtcggtcgcggtcggtgttcgaagacactagtcacaccagattctccccccgcgtggaaaaatccgtcggccaagagccttcgcgcgtcgatgcgtttggtcaggtaaaccaccattgaaccgtaggccttctcgctctcttttctgctcagccatgaaatcttggctacgttggtctcattctcctcactaaacgctgctgcagcctcggttcggacctcaccgctctcgtctagcacggaggtcttgttgacgctatcgactttgatcgggtagagctcgtcacggaggacccgagctcccgccccgattttctgttctgcaacctttttgaccagctgctgttcatcctcatcccggcaggcgatcctgatccggttggcgtttttcgggtcaacggtaacagcgcgacagcgccagtgcgcgtggccctctgttaactgtatctctgcctcaaccgctgctctgaccgagcctgcggaggtcgattttgtccctttttctgccatcttcgaggtatctatcgtgcaaaatagcgtgtccgtaaaggtggtgggtgtcgtgttcagcgttaaaagggaccgtatgttgcttgggtaactggacggcggagtgcgcgcgacatctgcgtaggaaggagagcctgcaacagcgggaacactgatttcctcgcgtaaggactggatttcgcgcaggatcgcatcgtggttgttctgagagcacgtctcagagtggcattgcggtgtcgtgtttctattcgtcagggactgtagctcgtgtcggacctccgcgagggcggtaccgaactgttctctggttctctgaatttcttccttgtgtatttcgtcacggagtctgatctctcgcctgagtttggcgatctctctcaccaaaccgccgacgtcgagctcttcgcgctcggtcgcggcgtcgtccgaagttacctcgtcacgccggtctcctagctcaattctctccttttgctgggaacgcgtctttcgtcgatcagtgtcaatttcctgctcacgagcgtagttgttcggtggtcgagtggtgcgtttcggtctcgccagtcgcggtggcgaatcttcgcgttcgtcacagtcgggcggttcaggggttcgcatcgcggcccgtcccgccattggtcacagtaactcactagacgcgctcgaaatcctgatgaaagtaccgagagacaagctacagtacttcccgaaactctttatactgtacgagctatacagtacgtctcgaaaccggtgcaaccacctacactcttcgattgtttctctaatcttgattaccaattcacgctagtacgcattagtagtttttccggagcaccactgcccatgggtattgtactgtttcttacgtagagtacctgccacaaaggtggggtgtattcgcttgtaatattaatatacacctcacacctccgtgccccaccatgaaatacgtaagaaacaacagatgccagttacagtgagacctccaaagtaattgcaccccttgacccacgcctcctgattacataatatactgccgtacaaaaactccataaattcaatggtacctagtacgatgtataccagccctcactttcaataatagcctgtacacgacggggcatagtatcagatagatgtttcaaatggtccagatctagcctcccccatgctatttgggccgtttccgcaaatattgcctttgtttcatcgttgtttctcatatctaatagatcaggtcgaatcttatagatttcggcctttagcaacgccggaggttctcaattggatttaaatcaggagagtaaggaggccattacataacctcaatacccatctcgcgtaaagcgtcccgaacaacgtacgcagtatacgttggggcattatcatgttgaaaaatgctaccctcattggcaagaagaatagggagattttcggtatataaatcccgaataacgaaacgatttacgcctccacgttcaggttctgggcctccgaatagtagaatcaagccggatcgtcgttgggcgccggagaatgcagcccaaaacatttgctggacttgtttcccttgatatggaagaccttgaacttggtgaagccggcattggtcctttcgtcgaataaaagtccattctcgacgaacgccaatcccacgttcgactgtacattcgtcggaccaaaagactctggcccagtattccggtgtaaagtgttcataacgacgggcccatcgaagacgctttataactttttcttcatcaagatcggatcgccacatacatctccacttccgatggtgttcggtatttaagagtcgtcggattgacccttttttgactgtgtaagagatctcagcaagtagatcttcataggtaatctttggattctcaataataacgtcaaaggacggactttttcagttgaatccaggatagttggccgaacagagcgtggtttcgaaacaccggccgttctctctggttccttttttagtatatcgtatagtagacaatgggatttgcggataacgggtatgaatacgtttatacccctacccaatagtatgaagctcgcacatcctctcacggatagctggggtgagctcggaggagcgagctattaaaaaaaaggctttgtagataaatatctaacagtaatgagaataagaatagggattattgagagatctggggaagtaaaaacataactgtacgcgcgacgcgacctaggattagcgtatttactatggcggtgaagctaaaaatgataggcggtaagaagatggatctaggggggtgcaaatactgtattgccttccccaaccaaaaacgagccaaacccaccgttatgtcatccaatatccgacatgtgatgataatgcggggtcaactttcgtaggccagaatccgtcagctattcttcatcaccgatcacaaacgaagaacttggtttcgatattggtcgagaaagaatcgtactccaagattccaatgcagaacataggcttcgacaaagcttgtgccatggagcttttgcagcgtaccaacccctttcttgaggaaagaggtctttctaaacactcatgggccgaatcccccaatgctgcttactctggtcccctccttcgggtgtgggacaagttctctggcagtcacccagatcaatcaggaagaatgcaggctcgtttgcctcgggagcggttgggctcacaagaaagccgaaaagaatacctagccacacacgccaactatcaaatatgggagccgacaccattcatatcattttctgcgtcggcaccgggtttattaaggtttctgtccaggcgaaaggggccaagcttccctagaacacttacggctataaatccaaacgttcgtatcgcctatggtctaccaatggtcgaaatggaatcagaattgaaatattatgaagtgcaagacccatatgggagggcttattcttattacaaaggtgaatatctttgtctttgggaggttacgcccgatgaggttgtggcacactgggactgggacgtccttattgaaaacgatcattggtacgaggacgagatactaccggctttcaaggagcataacgatctcttcttgcgcagaagtcggattaaagcgacgtttgatatgtcaacacttgaaagtgctttgcccagaatgctccctggctcagtcgacagagacgcactatctgggtcggatctggaccattcgagccaattggacccattatccaatgaggattggaattcttctagcgaggaggagaattggcagttcgaagacgatgcttattgggacacggacgatgaagcagaggaagctaacgcaattgatgatgcatataagattctggaaggcgactggtgaaagaatatccttgcagaacaagaaatggcagatattaggttgctaggtgttatgccttaccttctagcctggccctcaatgaaacagcaggtctattaacatgattgtattagcttccgccatgtcagaacagagcgtcaagtagagagagctatggctgacaggctgagtataatgatgagcaggttcatgagtagtctgcaggtacagtacgcaagtaatgtaagccactacttgcaaggtctggcgccgagtaatacccccaacccgtcacttggacataggagtggcagagggaagtgtcaggttgctaggtcctcgaggcaatccctagatctagtttttgacatgtttgcatttccatagaaaattctagttcccttgggccgccaatgcaatgatgagacaaggcaccgtatttaatgtaagtcaaataatagtatcgagactgatacaggaatattaatgttccggggctattcctaatgtgttctagtgtctcttgggagtggggccagaaagagtgtctgagattattcttgttgcaccggtttcaggacgtactgtacaataacgaagtgattgttactaaacactgagacaaagtggttgaaaatagtcagacatgggcaaatcttaccccctttgctcgtagctgaacttggctttgtccgtaggaagagctgccctcgcatatcgattttccattttcagcaaatacaccatccaccgaaaatatctcaggagaaacagctttcatgtgatctaggagcagatatttgatggattcaccgcgcctgacgcatgactggatccatggcgacattccgtatcggtccatggtattgggattggcgcctcttgagagtagcaggctcaccaagtctctgttacctctaaagacggcaagccagagcactgtttggccctcgcgatttggaagatcgatcttgacacgagggtgttgaaggagctggttcacaaccgcagatgactctttcgccacactataccacagagcactctcgccatctgcgtttctcctattcacgtgcaaatttttcttacgcaccaagagattggtaattagctccgagccatatttcgcggccgtcatgagaggagagaaaccatcgtgcagcgcattcacgtcggcctggtaagaaagcaaggtctttgcaaaggcgcgattggtgtttctagcggcccagtgaagcgcatgatctatagaatctctgttgggaagtcgagaatggaactctgcacgacattgtcaggattcggaaggctcctcttcatttcataccatgattttgggcgacggagttcagtggaaagggaaacaacgtgctgctcagatgatttttatcggttccaaggtgacggcaatagataggaatgaaagtgatgtaactaagttgttaagcatttttgaattaagagcctggcaagcgcgacatacgtggaaggggagaagcttaaataacactcgtggtcaccggccaagcatcagtttccccctacctgctgacgcaatcgactagcggtcctaggaacgctgtctaggtttctaggattgctgctcggttctacagagaccaaatccataggagacatgtaccttgcgatgctaggattgatattctatgatatttgtgtgggacgcagcttccaaataagccattgggtatccgaaattatttgtccgtccccgcttcgctgatagcctgcgtcaatggagcggacttgtctggggtaggggctcttatagtgcacatgtaggtggcgccagtaacaggaactaaacgcgatcaagcgtaatgattcagcatcggtcttcatctataggaacattacaagtatacatggtcacgcgtaattcctactggtggtttagtctgtcacgtgctctttctagccactttaggttaagcgcggtatgtgcccagcgaaatgccggtggtgattgcttcgagctgagtacaagagtacgcaactacgcccttggctgatggagctggatcctgctggtagtgcaatagtatttgtatggaggattaaatagtgttccgcgtacaaattcggttggcgtacaacaggtgcaactgctttgtgaagggtgagcacaggatatatataatgactggtatgatttgaggtttcaaccacgaacctagtgaacatggccttctatagcccaggatagcccttcgcgcttgctatctccagataatgtattataaggtcaatacctgtgtttctacacgtaacaacgcgtttttgcacgagcatagccgcgttgcgataggcgcaaagtgatatttcctaaaacgggggttcaatttcagacccacacaggagcccctattggctggagcgctagcgctcgcaaggtagcaccaccacgtgatcgctatgtcagtcaaaacacctcgtcgcgtatcggagccggtattcctagcgccatgctatctgtgctatcacaatattcacgttgcctgcctccatgcagcatgcccccctcatgcgcttcgtactcctgcaacacctgcatagctttggtgatccctccactgatacgaaccaactcgtcttctagttgagtttctcgagatgaaatactatccaactcgtcctggagttgacgaatttttgcgtgtaatgtgcgattctcgccgagggactcctggagatggatgctggtgcggccaagctcgttctttatttcatgattggcgcattccaactcgcggatctttgctgtgaaagagccgtttccctcctcgtcactacgggctggcccagactatattcaaatttagcaccgcgttggcttcagacaactgccaagatctcaatgctcacctcttcctttggcagatggtcccgttccaatcgggcaacctgtagcgtctgcggagtaactgcctcaagcgaccggcccaattcctcgcaaatggacctatacaggcccacgcttccactgctcaagttcgtctgcaacaggcttttcttagattccgtcacggaccaagcgtatttgtctccgactgatggctgtaggcggacatcgctgggagcgacgacaagaccaagtcgatcatctgacgattagttttgctcatgaggcagaggaagactatagcatacatatatgggctgccaatgcctcacgacactgttgtctgaagaaagcgcgcctttcattgcttgtgaggaccatgattgtatttgatctgttctgtcaaacaaggcttaaacccttgatatatgctcaggttaggcagtagagatcatatacctcgacgacttatcggctgaagacgatctgattgtcgctcaagcatcaaaaccccagtggggccaaccggttaccgatgaccacagttgaccgacccttggaaattgtcaactggctatgaatttctacgacaattgtattagcaataatcgtcagttttgtgatcataatctggagatttgatgttttcgaccatgagtcctaatccaacttctgccgcttgttggaccgggcagcctttccacccaaaccacgctgatgctgctcccgatgatcgatacgcagccacttttgtcttcggaatatgactgaaagtcgaggcggtctagtccaaaaatgttccaagaagtcgttcttcctatctcacgttagcgtgatcgagagcatataagaggggaatcgaacagaccatggatatccgaatctttgggaattggcctgggcttttatagacggattggacccaacgagcacccaccctttagtttaaacgggctatttatcaaccgttcaagtccgattttcgtcaaacctatccaactaagcgtttattatgtctcttggtcgttgtgtttttgcaccgtcagattgtttctccaaccatcaggtatccgcacctgggttcagagtaacttctaggcccttgactgtcagttagatagcgtagagggtaaaaagctacaggatggatcgaaatcagtttcaccacttgcacacggagattctttctcgaaccctctttcaaaacacgctatgcctattatagttactctatccctgaccccgtttcttggcagtattccaatacaattgtaaaaaatacacttggattcgaaattggcttccatattcaacaggcacagtatctcaaaccctgccactgggaccatggtgaaactacctggtcatttagctagcttacagaacttccttcgtgtcacttcaatactgtaaagtacctcacaaggcttatgcactacgtttcctgcatcatttgattaagtattctttctgccaattttgccttggccgcctaggcgccttcctagtaacccctaaaaggccaagacagatgcctataggagcaaaaatattctgccatttatttccgtcttctcggacacataaaccaccacctgttccccataggttctattctaccatcctcgcatcaatttcgacttgccatagtgcacggtacaataatacgacatggtgggaagacaagtatcaatgataaaacaagattacggtgaaatcggccaatcattaattgatgaaataacggatacattgcgtactcgcaacgcagcgtcgttactctacattgccgaacaaaaatgctttcagatcactggcttctctgaaacacagcgaggaaaatgcgttgaaatactctctggagtgcaatctagtgcttaccacttaagaatcaacgaagaaaccgaccaagacatcatacgttttcaactcatccctattttaagggagagtggccttgaccggacagcgtacgattttgctcgatccgggcaaaattttatccaagggcagcgcgactcccgaagccggaatgccatccgaacacgattggagagactgcgaaaagagcgacagctatcacctcgaaacctttgatcaccttcgtctcgtcatatctacaacaacaagggcgcaacctaccttacagcaatgtggctagcgctcacaaaaccataacggtagatatctcgcacggcgccggatgctccgaaaatataccccaactctcgcgcttgcaccgacgttatttgtggaaatccgccggacttttttacgctctccgtatgtgatcaaaagaaggcattttaattctacatatggcactgaatttctcgccgcggattcctccatgcaattagccattccgatcgaaagttttgggtttctcgtcttttgcgtacctcgccctcgctgttctatctcggctcattgaatgtatcagtgattgttaaataaggatcccttgtctcctctgtgtcatgccaattgaatgtattatattcaaatgaaatctaattcctggtgattgactagttctggcgtcttgccaatcgaaatgattggtaatatagatgatataagctaaattagatcacatgatcttagtaagcacatagaataaccgcgcgctcagagatagaataatggactgacagatgcatatactcgactggatatctattggtccaacttcaccgccctgattacgtgttccgacatgaacaccatagcacgtgataacgcctttcaatacgattcaatacttgagacggagctaagtcggaaatggattagtgtgtttcgcactagggttcgagatagattttatgagtgcaaagtggtgaaactaatttcgatccatcctgtaaaattggtttcgcactaaatcacaagatccaatttttcacatgactatgacactatgggacggcgagtgaactcggaagagcgtacaatacaatcaaagtccttgcgccgccatagtatgggccgtgctgccgactacaatcatcaacttcttgcgactattatgtgaggagcgacaggttatggatatgcgttgaatgtggcgagtgaatgtgacaaggaacactttatggtgaacgtaaggtcatggcggcgataaatagcatcgggagccccagccaaaagcatcacctctcgcattgcccaaaataatgcctctcatctctcgtcagccaacgcaccccgcgggagacgaacttgacactatgcccttacttgttcgccgccctaacacgcggccatcgcgaaagtctaagggtgccaacagcccagctcaatcaacattgcagcgagaccagcctacgcttagactgcggcttcagcagagatgcatgacgccggaggcgtggtggacgtctcttaccgcgtttggtgcacatgataatatttctaagcacatgctggaacacgagaaagccattgccacggaggaaattcgacaggaatggatgcgacgtctgcggcccatgccgcaccgacagaacccaccggcaaagaaaggaaagggacacaaaaggagctagcgctgctctatcatacagtacctggcggagaaacaatgttccaagggaacgagccttcaattactagagaactatattgtttattgtagatgtgaatggtaccatttcacgatatacaatatttgcttcaatatacagccatcaccttgaataaattagaaagattcaaattgctctgtggggatgacataaccagtcaaaagtaagcctacagatctagctcaaccaatggacgtctctgtatgctatcccaaacgagcgatatcgagatgtagcagtgtgaagaagcaatagagatcaaatgctgcatatttctcataatgaaggaataagaaaaatgccgtcgctataggtatatggaggagttactggtgggaagacgccgacgctgatgcccactaacaccatatgaaggcgatatccctgacggcaccaaataacgtcactgcacacgaagcggtttaatatcagcggttaggtattcaaatgtaggtctataccagcaaatttgtatggtagctatagggagtgaatgttggaagtcggtcgaatgcaagtaactaagggtctgttacccagtactactgccacggtgaccttggtctagccatgctccaccatgggcagccgagtgagaagacctatagtataaagagagactttcccaacagcggaatgaacgtatttgccaacacgatcagtcatggagagccccagcaaaacatcagaagtcacaggtacacaggtagaggcaccgctctacacacagccaagtccaaccgaggagcccccacttcctggtgttccaaccccgccgccggtaagaatagaatatgaatagaccggaccacgctgaccagccagacacaaaaccacgacatagagaggcagactttgactgtagagcccttccgacccatacttgaggtcttgaagcaaattgaagaagaagatactgaacttgcacttcgtgctgcacatctggtggggtacattcgatgtctgtgggagtcttgtgtttccaaacatacagacatccagcagctcgaagaagaaaatgagaagctgcggactgggaatattcagctgtgcaacgaggggaaccgtttgaagcactgccaagatgagcaagtagcccgcttgcatgctatcgatgatgcgttggatgaagttcggggaaggcttatcggtgtgctcaaagtttggaacgagcggtctgtcggcgatttggccattttgccagaagatggatttccccgatgttagtcgttgctgtcgaacaggtcaaatttacttcaaagctttgcaccgccgcaaggcttcaagcaagtgttcgatgatatcaagcatttgctagtcctccttataaatcccttgaatctgtgtgcctaaacttcgcggactaccaccgttgctgaacaagttgattgttcatcgactgaacttccagcacttcgaacagagtaatatgacaagatcatccagatggtcagaatgcataattgcagctgtcaaagtcagccaagagtggtatttctttgtacgcgaccaaatttacctctagaaataatagccagcagtacaggacaactccaaagaccgcaatcagaagaagcacacctgccaaccccattgcccaatgcaaagcacaacgtagttgtaacccagtccgggaaccggccgttgtatactcatccagtgaccacaagagataggccaagctcagataatccacaaagtgaagaaagagtacggcatgttgcagtgggaggtagacgtaaataccaaccagcgtggctgtaatcttgatcaagattgaggaaaggaaaaatagtgaaaaacagatcaccaatcgagatggcgtaccggtgaggcttcgcagcaggatgctcattcggagagactgatttttggtggttaaattaggatcgagcaataatatttcagacgcacgtaccacgagtaagaacggaaagacgctggatatcccaagtattccctctcgcacagcctcacttatttcggcccagctcagtcccacataaactaccagtagaacatctttcggtacagataccgcaaggtcaagggccagatgtgaaattccccgggctgctcgacgagacaattccaaacggacaaggctggcaattagcagcacggtagccagggctgtatggaacttaggcgaaacctgcatgactggccgccgttctcgcaacgtgcaagtgtactgggactgggttgaacttatacgcaggattacgtgctactggattacttgtgatatcatgaactggggctcaataatcatgccttacgatctataatggtcgcatataagttgataccaccgagcctccttctaggagccgaatgaatgtccctaggaacgggacgggtgttcctaggagcccagaaccccccgggaacacatacttggatcccgggaaccagctttctactcccaggcaccgagcaactttagcgcccataaatatagacacctattgattaaaaatgtgcccaacaagctaagtactctgggagcgagagtgactctcctaggagcgaactgcagtgcttaccacacgcattaaaactttctgaaagctcttataagataccttggtccccactgtgttaatagacagacacacttcctacaccgttcaatccttcaaattaacttattatctcatcttcggtaagagcttcatagcttgagccaaacgacaatatactgaacttctttccaaaatcaacagctcactgcgttcgcataatctgtcgagatgtctcagtgccagaaaggaatttcgttattatttcgtcacgaaggctactacgagatagcatgcagcataatggaacagctgacggcttcggatgttggcgctctcttagcttcacttcggattacgccagcccagcatacagtagagacgttcctacagccactacgagactttgaccccacgatgcgacagtttgagtcttggttccaggacaaatgccagatactgatcatcggcccggacaccattcgattgagcgaccgaatcttcaatgcagacgagtactacaaagggaagcgcccaagtcaaacccagctggaggtgtggatttttgcgatacccgccaattttgagaagagtgctaaggaagtccaatgcctcaggcactgttctcatgcctcctctttattctctatgcaggagcgcgcagaagcactgattgctggacaagagcttctcgaaaataatctgatcaggcagatcagttatacagatgccgaaccaagcaaagtacctggagagtacctagatgtcaaaattttcgatctttttagcacgaccacacatcggtatttacacacaacacatctaattgggcttgaatttgcgggaatggaatttggcatcgagtggaacatcaaggatccaacgtcgaaggaccactgttggaaggcaagtcacggaattccttacattgaggctgctagccctcgcgacaccaaggtagccgtgaaagaccgtcggcgtcatcaaaaaccccaaagcctggtattttaccccgtgtacccggattgggatccacagtcaacggtttctatccctatcagctcgtcctgaactcttgcgttttgtcgcaacaggtgtgttgttggttggtcagttgttaatggtaatgaacgagtactgtaatagaactataatcttacgttgatatagcggaagtacttagggctcgatgacaccgacccaatagcagtagatacggagccagagacaagtagattccaaggccgcggtcttaaggccttgcaggccatcagattgccagctggcgtcccctacaattccacggcccgcttagccacaggcctcagagctacagatccctgatggctcaagccctgatacaagcctttaacgtgaagtccggttgcgcgagcgaccccaccaaaaacccacttcaataataatgcatcgtctttaaccacaacaacaatgctgccccccccccctcccccccccaacgctccgataagaaaagaaatttgatagagcaggagggtcgccttttattagctacacaagctataaaaaatggcaaatatccctcagctgcagctgctgcacgatcttttgagatacctgtctcaacttttgaaggtccagaccaatgggcgcgaatctgctactgaaaagcgacacaaccgctttattcttaccggaattgaggaggggtcgattgaaaaatggctactggatatggattccagaggggtagctcttaacttgcctatgttgcgagatatggccaatcttctactttacgcccgaaaaactacacccactactgtgggtaatcattggcctgctgaattcatcagacgacgcccaaatctctctactcgcctctctcttaaatacgattatcagagagctctttcagaagacccttgaattattaaaccatggtttgatttggttcaaaggacgattgaaaaatggggcatcgcttcagggtagcgatagcgatccaaatactctttggaccctctcaaagtttacaaaatcgcaatctcggatcaaaaaggtctagaatcttctgcttcaattctttcttcaccaacaaaaagggagattaatatgagaggactataaaagtggtctaccaccacatgtttctctagaatcgctgtaccctattggaggctaccaacgagcaacagaccaaaaagcgagagaccaaacacaagtttactactcagaaaggcatatttgggggtctagagggtggcgaggatgatgtggttgttgaggatgaagatagaagcaaagatatatcttcaccagaggtgcctgcaaaaccggttactgagcctgctttaccttctatgcccttagttcggcggcaggtgacatgtcctggctgtggcataaaaggtcatacatattctaaataccctacacgtgttcaatagccaaatttatgtttttttctgtggttttaatagtggttaaaaattgaaggcttttcaaggtttggtggggtcgctcgcgcaaccgggtcgcccgcgcaaccggacttcacgttagaaccaattacagtgctgtgagggtctcatgtatacatagaggtagataccgtctggagataagcaatcaaaattaagaacaactatgattgactccagattcaagacgtacgaccaagaagcaaaagaaaggtacggtaacttcctcgcgttcagggggaaccgagatacactacgtgggtcgaccatagcgttcatcctccaataatcgtatatgcgtcatttctgtccctgacaagggccctagaagcaagtgtcgcgatcccgggagccagtgccttgacattcaaagtaggtgatgtcatgtcgaatgataccggggtctatagaaacgtcagcaaagctacatcgtcggaatctagttaaatagatgccatggccgcaaagactctcaagcccaccattcaattaccggaagttatacaacgtcttcgccatcagagaagatcaaatgcctccacagagaaggccagtggcgttgcagaggcccttcccattaccgaacgttcaccgaggtcagtcgctggggtggaagtaccataacagtcctgactaacatcggcttagacagacaacatccaactcaaagagttgagggcatcattacgagcatatatgctgaaatgtcgagaatgcagcatgaacaaatcctcatggtgcaatttcgcgacaacatgctgcgggcttacagaaatgaaaatgccagtttggaggagcaaaatcggtctttgcttgaacatgtcaagagtcttcagcgagaaaattgctccctagagctcaagcacaacaaactgatgtctgaatgggcaaaggagaggctgcagtacccagagcagcccgatggaaagcgaccttagagaactgcttgaccagatctgattaaccggattttgcatcaaactctgaggtactcggaatattttcacccgcgagtctgtgaatatgaaggaagaagaggtacctagaagggttagcgacgccatcactaggtgttcaacagggattgcgtcgaagaccgagcgtgtaacagtccgtttgagcccgcaagaaatgtgccgaagaaaccgcagccaccttattactcatggccacaaagccaagttcctcaccggggtagcaatagctgtaatacaataaccatgctttactataagaataagtggtctttccctctagcttggcaaaacgaacagaatgcccccaaccgggtcaaagtggtatcgatggattgatgatacatctctccccaacttatatgccacttcagcggctataatcatagcaatttgcttgctctattggcttgcacgagatgtgtggctctgggtgtggacaagacgccatgtgatctcccgtcgccccttccgatcgaaaacgataggctcttggaggcgacttgccttcgtccacctgccgaaatgcctgcgttggcttgacatccccaactaccgggaagcgctcatcctaactgtcatgctcgcggcaaatattattggcctccggcttagagcccattcttgggcggaagcacagggtagggctggctctttggcagtcatcaacatcgtgcctttgtgcgccggtatcagctttggacttccagcggaccttctccacgtgggccgccagatactcgcgtggtttcatcgctgggtaggtcgcatctgtgtgctccattctctgattcactgttcgctgcttgttactgtcgccaggacgacgaacctggcgacctcacggcacattgttccaatagccgtaagtcaaagatatgtgttcctattgcgtatactaacatctcatcaaatataggccggttgtgctctctttctcgtgataccggttacttgtgcggcggtccaatggcgatacttgcagattgcgatgaaatgtcactaccttcttgcagcaacggcgattggcgcgcttatataccatctcgtggagcggcagtcactgtatcggtggtacctggtaggcgccatctacctgtggtttttcatcagcgctgttgtctgcataatggccgcatggaatcacaaaccttggggatcttcccaaaaggaggtagtcatgaactcggtgagccattttctctggctggatatagagctacccctcaaccgagcgatccgccctggccagcacgtgcagctttggatgccacgagccggttttcgggctttctttcagctccctcggttctatgttgcattctgggaaaatggaccaacgcaaagaatagtccgtatggtagcagagccgcaacccgggcttacgcaaaagctgtatcaccaagcactgaaatccccggccaagcagtcggttatggtactcggtccctacggacaccctctcgatttctaccggttcggtacaatcctcttcgtcgtggaggatattggattttttcgagcgctttcatacattgagatgttggtggaggcaagctgcaggcgcgaagtgatggtgcgaaagctcgaggttctctggaagcgccaagttggcaaagatggtatgtttcatggacaagtactttcgggtcaaggagccgcctgttgatcgggcttttccagagaatccacaatgggtaaatgactggatacaaggccttttcaatcgcgactggagagcgttcaaggtggattttctgctgatgcaactcatctgaaaagtcacgatctgaccattctccagattttgcaattcagcatctactgcccgcgtactcagactggaccccagaacaatatttcctacgaatatgccgaaaggatttgctacttttatggctcgatcaaaatcgaggaagaagttgaacggtatctcaacaaccaccaatgcggagctgtggccgtagcgggtgagtttccgagttctaaccttcaccccctatcgtgggctgaataacaaagttttgtgcttacggtgcttaccgcctatgcagtatgtgcgggtccgtcaatacgtgaggctgtgacaaagactatacggctacacacaggaagaaatctccagctaatggttttcgaccccgatatgtgtcctgcgccggatggacttgtagattcactcagcagcgatgagactccagctggcagccaggatccaccacatcaacttttgggagtaggcgaggataggcatactcaccaagtacgacgattcctagcggacagcagcaagctacagtacccatcgcctaaagaaatctatacggaagctggaaacgtcgaaatgaacaaccactcgaagtgggtggaaagtagattggcacaagggcgcagaaagcctacaaccactaaaccttgagattgtgccagctttataatgcttgcgctctcagcgtattgatagattctgcagcttactggaaaccatatcatctgccgcaagttcgtatatcacagggagggcatgggaagcttggagcctggccttgattgccgcacagccggtccgccttcgcgagcagatcccttcctggggaaacattgatggatatcttaagtggttgatatgatagttgatatgataggaagacgatcgccgaccatggcaaagctggcagcgaagcgtgccagtctcgggtaggatggtgtgtgcatttcgtcccgcagatccagcacactccggagaaggcactgaactgccttctcttcgagaagatttcaagggacgaaaagatctcttggctctattgcttagaatattagtatttgcaacgcatagatcatgagctcctcatactttgcatctatccacaatttagtgccaataaaccaattcatctttgtgtgcgcagagagcttagttgaagactttaagacttacaaaagcaagtgagccctaaatgtcactggttataaagtatacaagagaatatagagcgaggtagaccttggttcatggaagcctttccagcctaagtcaagcggtattgttgatcgcacgcgaatcatattatttggaacccagaaaacacacgcataggtttaggcgggaaggtatgtcttgacaaggaatcgaataagaaaagaacgatattgtgaaatgaaaccgttcaactctgcttcgcttgttattggccggttggaacccggttgaagtgtaacgttttgagggccatgaacacgaacacgtaggagacatcaatatgggttgcattgttcaacctaactcaccattagccctccgcttctttagcataagggaaaggggttggtaccattatttgcgggagttgacgtcccctgtctaactcgaccggtcattgttttgaccgacggtgaatggaaccaccgcattaaaacacgcccccacttacctgtcaccagttgtggaacaaactaggattgcccacagaataaatgaaaaaaatatatgaggaataaataagaccgccattgcattttgaggttgttgcctactgaacgaaaccacaaaaccataggaacatcgaacatcaaagtagacttccgcactagccaatattacacaccgagatctaaattaggttccacaccatcgacagcatacatattcattcctgggtcaatccaaagtgctccaaaaaggtgcttccaccgtcgctgcacgtgtgccattagtgatctcgcccttttgtgccggttggccggttataaagttgcaagttgtgcagctcaaacgtctcacctttacaactcaaggcttcgttacaaccattttgtcgtagcatgttattccaatttctgtgtctgttgaaatccgtgatcaaatcgatgaaattacagctcaacgtgccgattgtatattccctagtgtaccattcatcccaaagttaaaacggaaccaccaagtagtgccagacgcttggtgccttgcaatggagattttggacaggatacaaggcctcttctaacaattgagcggtattcaagaggtagccaagtcggtcttggagctcctcgattggagctactgttcgaaaataacaacaatgaacggttgatgttctgattacaagatcataaagatcatagtccttatgtatgggaaaagtgaacctaccaaggatctttccattcacgcacgagccaaatatcgctggctttaattctaatattgggaccccaaagcattggaaaaggctgctctatagatcggatgagtaagcaaaggcgcataaagtgttgccacggggagcgcacgcccgtacggatgtgtacccagccagcccatggccaaatattgatagccggagaaggccagcctaggctgacagggtgaaacagaacactagtggcgaagtaaatatttctatccaacgaacaaaagaaaaatgaaggggaaaaggttcgaatatcctccaggatagtacattatggttgaaagcgaatgacacgcgaagcttggatcggcgtgaaggaccctggtgcaagtattcaaacagtacgccgatgacaggcaatccatgagagcaaaacattcagagttcccaatttcccaccatattctgtacaaaggtctgtgggtcaaggaatggcatgggtatagaagggtgaatgcgagataaaggaaccgaactccacggggtagaattatctgtgatctctacccgtggccgtatagctaactgaaaccgtgattgtccagcgcttgttatgtttcccactgtagagttctgcgagaggatgtcacttatctgacaacgtatccttcgtaagtttcccagcattgactcaactcgtggaagaaagaacggatactcttcgacagcctctccggtttccgtactgagcttactgagccggagttctatccagtccacccgctcaaaaaggaaaaatgccgatacataaaggaaaatatcatcggcgcaggtgtcttgggataatggatctggccccgtccagctgaaggagcggacgttctcgtagctgggatagaagacacattcaatggcaggagtccccttatgtccatgctgagtatactctaaccattccttgaggggttgatttgagcaccgagtgctacggttttctgcgaggcaaggcggcggtgtcggtatgttgggaaattctctccaaattgattcaagatccagatccaaatcgtagtctgaagggacatcagcgccagtgttaagtatggaagaaatccaactaaccaattcgatcaagtggtcccattattcccatgcaggaagtacagcgttcacgataaaagacagtctcaggaggtaaggataggaaaatcttggtggattcatggggtctatatgtagaggtcagtatgactagctgctagggtatagaaagctcaacggaaaaaaaaaggtccaggaagggtcttggccatgaccgtgagaaggctatgttacccagtgatggtggctcctggtctacgtaggagcaaacggtgaatgatcttgtttcctgctgcaaatgtactttggtgaagggtgcggaatgcccgccccacacatactccacccgttgaactatctcgaccgacaagaccggtcagaccatgttctttgctatttatacgataaccaagaatttggccagacgaagatagcttgtttaatttgctcctgcacggtgtcattgtagctcatttatctgacacgagggcctatcactattctgtagtgttccgagaacgccctggtgtacggagacaaaggcctgatgatgatcccacagcagcagttcttgatgattgcagcactgttgaagcttttcgttttctctcaccaaccattcgttcgagttttgcaggaagcgacgttcctcttccaagcgtatcttaccggccgacttgatcgtgtagcactcccatagacacagatagaggtcgagaaggtcgacggcagaggacgactttaaagaaggatggctttgtaggatctgagacatgttgctagtcaaagaacaggctgcaccggccggaattgtctggaatgtttggttagagccggctataagaggtgaaagagaaacctaacgcttgtcttgccccgtgacgctcgtttcaaagagtctaatacctgttccgatcttcctggcatgtcaacggggataaaaaactgatctggaggttcacgttttcttttgttggctcgtccagactgagacggagaagcaggagagtccattgagccgtttgggttccaaagctcgtcgctatccagattgtagaaaacagggataggagagaacaagctcgggtaaactgtatttttatatcaatggtcaaggagattatgatacaatagactaggtcctacggagattgtatagggggcacgttccagctacttggatgataaacacacccgcatgaaatgcctcattcaccaccaggctcaataagaggatgccttgctaagggtggatatccttgtatttccccttgacgacgccctgtcacgatcgtataaatgagggccggcaaggaatcgcgggtgcgcacataaaccggttaacatttcgctgaaattgcccgattttacaggcgagaaagctacgaatatcttggtcagggctgctagttaatgatgagtacaatatctattggacttgcttttattaatatctggtcaggcacgacgagttcatacacctacagtgggatactgtaaactgaaatttagaggtgcaaattatatattatctaggtagcaatacgagtgcggcagatcatgatcaaaggcaaccgccttctttgaccaaatccatcatgggacgcgttgcgccgcgtagtccggcgcgaaccacaaggaaaaatcaagaaagccacatgcagacctacaactcgtacggtgactccattaacccaccccctgggcatgcggacagaaaacgagccccgtccaccataacaccatcccaaatcgaagggtcactcatatctgctgaacaaaagggcagccgcgtcgtatcatcgaatgcaaggccggcaagttccttgccaccgccctccgatgaaggatagacacgacgcattagaaactgctggctcctgtatcgatcaccgtgagagaagtccccaaacgcgagaacctgcagggccggcagtccgtcggggccaaatacccagtctgcaaatgacacgaaatcctcagcctctgcaattgccgcagaagacataagcactgcctcctgcgagtctacaaagtcgaggtgtgacctgtcaaagtactcatcaacaatgggagggtagttgtggctatcattggtgacgtcccggttcacggaactccagcacgaacgaggatgccatgaatatcctttgcgcatcccatgtaggtaagtggtaatctctcgtgggatatctcgatgaaatcgctcgaggccgctgaaccgcagatgtagaatctgaagctgggaatgcttggcagtaggtcgaaggcaccgacgctgttctcattagcggcactcgttactggaccgaggaaaacttacagccgcagacggactagcacacaaagccagagcacacacctggcccaggtctacaccggtagacaaattcgtaacccaagcgggcgacacatcccgatcatcctcaaataagccatcagcatcgattggtgcgagttggcgctcatggtagacaaggcttttcaacgtggtctggtggtgttggatggtgtcctggatgtgggattttgacgatgggaaattggacaacctcaaatgcagatgctgcagcccacgaaatgaacataagaaccgcacaacagcagaaaggccacatccttcgcccggttcgtgcagcagataatcgaaagagaattcgaaatgcgtcagtcggagcggcttctgtgaccaagacagtaattgcacgagatgcaactgattcgggcagtcacgcagcgtaagcgaccgcagagagtagaatatcgtattgtgtcccgatgagatatccaggggcaaggtcacctttgacaatgacagcgtggacagagcggaaagagctgtgggattcgcaatccccgtatcctcgttcgtagtgacgccggtccctctacccccttcctcaagctccggtcgctgaagcccaaggctctgccagcacagagcacgggcaaaagccgatggaacgaagccgatggacagatgatctaggcagctccagttctgacggatgcaccgtcgcaacaaatcaacctcggacggatgttggagtccttcccactcaaacgccgtcagacaggttagtctggacattccttccaagcggtgcgacgtttcagggcaggtcccatcagtgacgagtgagagacgagtgaggcgctgttggtactgactgagatagccttcctggtcaagaacccccactggaacacatgtccccagtcgccatctattgttagtcagccacaggtctagtcgataggtatcgcttatactgactcaaatatgctcagtctattcggctccaagtgggtgaaaatcagctgcaattgatccttcacgtcgtccaggaattgctgatgtgccgtcgcatcatccgatgctcccagcggggccggggactctggcagccccgcggcacgaaagatgttgtagtatgcacatcgattaaaccgaacaagatggaatggagccctgatctgtaggtgccgcgtgtgctggagatagtccgcggctcgggaaggaccgagatggcgaaagaaggggtcgacatccaacacattcagtgcccattcacttgctgcacagaatgaaactgtacggtatatccgaggaaccaacactgcatacaatctggacgaggcgcggctgagaacgcgcagagtggtaactggcagctgacgggcggtcagtacctggaccaaacaaaacaaacatgctgggcttacccaatctgcaatcagcatcagaatctcacacggcaaggtctccagcattgtcctctgtgctcacttcattcatccgctccggacagcaagaggcttataagcacgcatctatctgagcacccagtcaagttgcacagacattgcgcagaggaaaatgtctaaaatctgtgggtcatgcatggcgttggcaagctatttcatccggtcactgataaataggctcagtgccgtttttgcagccgctcttcacccgcaggccgccaggtcttgtgaagcgcgttgtcaagctcaatggtcgttcggcatgagcgacaagcaaccaactgaccacagcggtggccatggtatcttccccgaaattggcaaccagaatattgaacgacgagtcgtgttcgagaggaattaataagaacgttcaaggggagaacaggtcatgtcggcgcacggttcacgtggggcaacggatcaggtggtggctgaaacggcgagtgacggttgggacgattatgttgcggtccacctgtacagcaatttcgaaaacagtttgctcaagtgccatgtcctacaaaataggtgacagtagtaggtcaagcgagacctgcgttgacccggtgtaaacatctaacatttacatgtcaatgggcattaggccgtttacttggagagaaaatagaagtggaaattgcgtttagggtgcaatcttcgtgtcggcttttcactgagattgcgcaggtttgtcaccaggactaaggcactgggtgatagggtttacctatagggtggtcggttgaccgggcaaaaaccacccacgtctactgtcgtgcaagaggaattgattatcagcacatacagggtgaatggagatatgagctgcgagacccacatggtatgtacgagttcccctgaacgcgaatagcgacaggcttcctcgcgttacgcctgatagagtattcaatgccgactatagttgttcttaattgattgcttatctcaagacgctacatatactatgtatacgtgagcttatcacacaaacaataaattagtctgggaggcagtttgggacgtttgctatacgatacgggggttatgtctcggaaatatatacagattgtcagcgatctgaagtacacaagatcttggctatcacgataaattgtgatcagatgaagaacattgaatcgtccagatttcaacaccagggatgtagcctttttgatcgacatggaaggaatccaggcaagggccagatatgagaggtaattaacaaatgttctgctcacgccgactttgtagtctgccacaccttctccaggacccaatgaaccttaagctgtgttttgagccaccgcatgcaagacagcacttgaataagtgacggcattgtaggccaggactaaatgcatcacatagaggctgggccgccagccatttaccacgccaatcctttccaacggatgaaagagatagaatgtagtgccaagagaattccagatggccatttgcccgtgatgtatcgccaatgagggtgcactctgggatgtcccagtgagggcataaatggttggtatgagcgaaagtaagcccaatgaaacgcagctgtacggaaaccggtaccgcactgcacagcagcttggatcgcagattacaaaatccaccagaatctcgacagcaacgacggtgaaggcagatatgtatccgagctcgaggtagggttcggtgcggaataacacaaccacagaaggaacggtggctgcccaaatcaggactaaagcggctccaaactccagcttttgccactctgccgcatcattgccccggaaagcatctagaaagcggtagaagacgctggatgtgcaccagaagatgacacctgcgcaaaagactagcacggacagggagtccaaaattcctctgggggatgaggggaaatagaagagcagaaaatggatcacaaaaaggtagaagtagagcaatacaaagatattgattatggtgatgattgcaaaatcgtgcaaggactgcgcttttgggtcagccatttaggtcgttggtcgtgtacttgttggagcgaggacatggggaaaactgagcttttaaggtgaatagcaagagcgaagtagctgctgaatcggacgccaccctggcctgtgtattgcccaggacataaccaatgtaacttagtagaagaacatcgtgagagagaaggtcagacaccgtgcaacggttaacaagtgacactaaccagtggctattaaaatgcgtggtcaagagagggtggtcaagagagggtggtttagagagattaagcggtaccagtacagaaattaaccatgctcggcacactggtgttcgtttctggggggcatcatttatgtggtggttagcgatagcctatccttttgcctgggctggccagcttaccctcggtctatctcacgctcatcaataactggcacatactgaaataatcaaacaatagatgcgctctgaactgataattttgcttgtctgaatggacacgtttacaaagctggtcaaaagcgccagtaattgccacctcaattctgcggtccagtagcccacagcttttacatcagtatttattcgggcaaacacagtggaagtttttcgacagatacctctggtaattcgaattcctcaaccggcccgaaagaaggcatcgcatgattgttaaaatattccccgactagttggcgccaagcaatgactctccacgtcctggatcttcagcaatcgagttcttgtcggaatttttgcagtataagattatcaccgctgccaatatgacaaccaccttcccacatcagataacaagatcagcagagcactatggaggaaatcgtcgatatagttcgacagatcggacggcaacagggagaaaatgtgtatttccgaacctgctatgcccttttcaaacacctccaggataaggccgagcaagcgtcccaggacctacttcacctacaccaatccggtgcttttggttcctccgatgacgaattctaccccgtctatcaggtcgcacaagagcttcaagtctcggtgcacgaactggctgagcaggcacttaaggcgcagttagcctgtgaagagttttgccagttggaccccagctattcggcccgcgaagctttcaaatttaccgacaccgtacacacagccggaaagactgaagctgatgcatcccagggtatctgcgatagcccccggtcgatgcggtttataatgctaccagtgaatgacctctaaataaatcccatggatggctgcatgatcgcttcgaagaacattgtcttgcaacggaacatttgatctggaaagctcaagctcgaaagcggtcataatcatacaagttagtaatattagcctattggcttcttttgatatgatgtcctagacctgtagtcctagaatacatagaaggcattgtaacagtatgcctagtgtcactaaaacagagtttgagaaaccattggacagaacaaatggtaaaactgattccgacccgctttgtaataaagcggcggtggcaatggtgtagttggctagtactttgaggcgacctgcaggactcgttcacggaagaagcgattagagaaaagagtgagagaacagtctcaaagataccgtatcgagctctaagccgaaaattacaaagatcttcgcattcaaggtgctcagcaacaattgtgacaagctccgggctcaggtagtcaatatttgcggacatattgagcgtaaatcaaacgcctggggcctgtcggggtgtaatcagggaagaccgccgatgagggaggggcacacgtatgtgcaacagtatgggtattatgagttataggtcacgtggtaagggcttatcatacagttcagtattctaaattcagctgaactaaaggtagacttgtagtatgtttcaaggtagagtttgggaaagaatcaagagtaaaatgttgaaacttattcttgaaactaatttcgagcgtgtctgtatttacacaatagggtagcctgtacatcgccaaaatcaaggagtcagggtaaatgaaataatccatccctgtggtaaagcatctgacggaaatctggcatacaacaatgtatgtaacctcagtggtagtgaacctctaaaaaaaacatgaaaaaaccgcgatggttaaacaagccatgcggacctcgatgactaactgtaatatgcacttttgtatgatatggttggtacgtaccatcagtcacatgattttctgagtattttatcctgtctcaaccatgtattcgacatcaccttctgcaatcataagacattgtggaaatctacaggtaagagatgtatcgagattactttagcaactttcatctctcatattctttatcgaagtcgatcctgtaacactgtagtctacatctaattaggcctgtgtacgtgtttcctagcttgcccgcttgctattccatatccacatcaaatgcagcagcaaaacatctcaattagccatgtcaaaagcgccgcaaaagagaatgttactgctagccaggttgcagcgaatgaatgcgccccgagacttgcatcggctcccagagggtgaaggatactctgtatagcacccgtgatcaacccgtagattaccgtaacgccaatggatgcgccggcgacaaaaatagttgcagactcagcaatggtcagcttactttatccagaaactaatcacagggcccttaccaaggaagaaatgatgagcaatatttttccccacgaaaaaaacattgtggtgactccgaagacaacagccacaaatgttgaaacaaaacccaagatgtaagctgagattgaccaccgagaaacaccgtgatatccagcaagcaccttgttattcccatctggtagtatcccgtcgatgactggggaagccgagcccaaaatgctcaacaagtcgaacgagaaggaggtactgggttgcgagcaattggaataagatgatgtttccttctggccttggcaatatccccaaagccccacagaatagaaacccggcaggtgtgagttgatttcgtctgataaagattgaatcttatcggtcacctggctcgctgcagtctctgcggcgcccgaggcataaattacagcagtagaagcgctattcataacgctgttggcctcactactggctttgtttgcaacatcgattccgtccatcgcggcaataccgagggagcgacgaggatgatcgctcccaatttctggaaaattggtcaattccacctattattttggctttagctaactattccttgagttttatgggatattagctaccttcaagaagtacaattcattgggagaagaggtcgatgtgcatcccgcaaagataatggctaggcaggctaaggccgctatagagaaagccaagggaagtattcttcctacgtgttgcagcattctatttatgccaccaaggaatctagggaagtcagtgtcaagggtattctcaatgaaagcgccccgcacgagcatgtggaaaccatgtgctctttatagaagcgttaacatgtggttgatgtcagaatagaaaaatatattaactcaaagtaggggaactcaggagccatccgtcgaatgtactcattgaagtggaaacggcacggccgttcttaagtgctgttcgcggttggcaaaatgaccctcaaattttgttttcagccagatttggcttaatgtgatagacctggctaaggcgattgatatcacattacagcaggttttactggaacgactggggccttaacagtgagtgaacggtagagaggataacgcctgatttctgaggttagtaggttagctggggcggcggaaatcgactccctcaacctcctgtggggaaggctaaccaccattcatttcatacaacggaacgtataacatcatcagcctaaagttgatgattgctacgatatttcagacgaaatggcaaacacctaaaaatggctctttctttcagggtatttaaatagtcccacccgctcagcagacaagctcaagcatacaacgttcactgcattacaaaatgacacgcttaacacaagcccaagtggaagaagccgagtacaaagtattcacctatcgtgaggaacatttcaaaatggcagcacgggttgatatctctcgtctcgtattcgacaaaaacttcaagcggcaaatgagcaaccgccaaaatatcgctcgtcttgagcgaattctggacactcaagggtgtcaacgcctgatggaggaatgccatgtacctgtattgattcctgacagtgattggcaacgtcgcgttaggccacggctggtagatggacaattccatcaattggatgtcgatatcgactaccagctgcgcggacaggaccacgagaatttaattattgctgcccggaaaaagctcagctctagtaattcatggtggattgtggatgtttatgttacagggcagacaggtgcgtgaagaggtcgctatcccccagaatatctttgcctgattacattttagctggcgaagaacctttacaagaagaatttgtccgatcactccgggaacgcttcccgaatgatcaaaggcctccggatgggcttatatatgagcgaatacggtattatgaaggatatctcgacggccccgtaaacaggatcgcagcaaaccattggtgggctgccctggaaagggttcctggaagcaaaaagggaaaatatctgcgggcttttctcaaacatcctacactaccccaagccttcgatgagctgctccctatagcgggtatctgggagggcatgcgaatcgggctactacacaagttggtgtcaatgcgctgtgatgaggtaagatactgaacccaagccccatgaccgaaaggctaagtggatgtatcagcctctcctatgctaccttaaccacataaaaagcaccttttttggcttaatgggggacaggcgggatcttttggcgcaattagacggcgtgtccatccaattattgaaatcccgtgtgcccaaggtctctgctcgggacttgcggttcttggaagatcgaatgtcaaaggaagaattgttccctgatattgaaggtgttcaagaccgcactgaaatttgggaacgactgaaagagatccagtaccccataccgacactggagacatttttcaaagacaggatcagtctagaggtaggccggagtgtactacagcaactctacattcccgatccccatcggaagatgactgtcgacgaagaactcggggaacgatattatacaagtgtccctgtaatgacttcaaatcgccagcatggaattcggggggatctttatgatttctggcggttcagctttcagtatggattcgaaatgactgatcacaagcgccgcacgcggacaaagcctgggacacaactcgcgccgacacccatggaagaacttcacgaacgacagaaactctggcaacatctcttttggcttgtcagagaaaaaggctttagcacccctcttgtggatggactaccggctcacccggttgaattatcccctattacaccgtgtgactatcccgcaagtgtggaggaagacctaccggtggaaagacgaaatggaacgccatataaggactcaatggaggcagatcattttgcactctcgcgggaggtattggaacggccctggagctccccccgagttactgcaggatttgctcgacgatcggtgtttttggcatatttccgctatctcaaagtcgaaaatggcagtcaatccattcctgaagtcgaaaccaacgaggcagttcctcaggaaccttctttgtggaacccaagctttgatgacctaatacaaaatacgatcattccaccagaagaaaatgaagcaacggtgttccccgtcttttctaccccgcagtttgatcccacctcacttgctccagccggggatattcagccgccgagccgcttcagtatgaagttcatcatccctggtgagcctgacaaagtcgtactgctaccaaatattcaatccgctttgaataaattcttcgaagggttctcaagatatcatttccatatatattctggcgataatccgacacggggtatctacgggagagattgttattcgctgtacttagggaatccgtttctacttttacatgccgaatacataggagcggatctgtctgaaacggtgtttcacgggtcgaccgaccagcaggaaacaaggacgaccaaaaagcgacgtttgaatgagaacgaacaaggtgaacttatttctgccaaagaatggttaaatgcgagcctggatgagttaacacaagaaattcctgaaaatcgagtcgatatggatctccccgggggtgaagatagtataacatgaatatgactgtttcggccttgctcgtgactcctttgtgaattccgttgtggatgggttggtggatcctcgtattggcaggctgcgctttgtctcacgacccttgtccattcgaccttcccaaagcgctcagaagaggcaggggaaggtaggcaggtataaagggtcgttgggagtcctcactgggaccgggaaggaggctgactatctgtttatagttccttctcttctattctgatgcattgcgtctgaatctttctcgcggcatggcaccgatcaatctggacgacgtcatccattatcgtccgcctgctaaaaaaccacatttcaaaccgctccgggcacccggttcccacgatcgtatctattcacagatacctttggatagacccgcgccagctattctatccagccagcactggtgttcgagtcttccattctcggggcatgcgccgtaccttcaaagtcatttccatgcacccagtgaagtcgagacgttattagcccccaacgagcttgcggaagaagtgaccattgacagctcgaatgagtttgacatggatttcttgaatgcctcttcggaaagagatgcaaacgttgctatatcaaatatacacacggcgagtcgagaattgccggatgatgtttccagcagtgatttagggcaaggtttatccgaccagcttcacgatggtacgtggtgaccatcattttgacttcccttgatttcttcaattcactctgttgaactcattgtgccctatctctctttccttaacgataaagtgttcgacaacagagggctgacttcgcactttgagaccagacttccaaggtgacgagcatcatgagagcaacgtgacatcttcttctcaagatattattcaggggggaggtcttgagcaatccacacctttatactctacatcggtccgtgatggcctctgcatcccggtggcggagggaaaaattctaagccgaacagaagcatatgaaaatgcaggtcagtgctctcagtcagctaggttgcccagtcctctggctcacgtggtagaatgcagacgaattcacgatggagggagacattttgcgacattcaaacccgacaatagatatagcagacggcaatacaatggtcaatggccaaattcttgaccctgcgggccaggaaaagcaatccactccaacgcatttgttgtccggagatgcgggaattgaagcagacaaattaggattgaaaccggcagcttgcgtcatcggggaaagcatgccagccgaggagtacaacagacagcccgtttccgaaagccaagtggttattggccaggagaaagacagggctgcagcccatgataacaaaggcgagctacagcatcgtcatgcggagagcctgtcagcatctccaaaacctcgtcaaaatggaacactggcgcgttcaatctcacccgcatttcaaaacagtgagaagcagtcgccatgcagcccaacagtggaagttacaggattctgtccagtgttagatcaggccccagtgttagaccagccgtcggtcgtcatctccaactcccgtccccaaaagcgaggaacgaagaactctgtctcaataacacgaatggcctctccgaacagaaagcgagaccgggatgagtatatatccgatgatagcagcgatgaccctgatggctccgacgatgcggactacgtaggcgaaagcggtgaagacgcacatggaagcaaggttccttcccatcgactaaaaagagcaagacgacctgccatgcagcttaagactagacctccccggcagaacattaaacgcctctcggtcgatgaggcaattccatccaaagtggccgcagatcagacttccctaacaagcttgcacgaaatcgaaacaattcctatccgaggtttccttacgcgacagatacttttgccaagggtcatctattcggttacctttgaagagcaggcagagctacatcacaatatgaaaacaaaattggcagccagcattccaagcaatcccccaaaaaagggtctcgcgctgggaaaatgactaggccaacccgaatcctatctaaggacgaccagcttttgattgaattgaaagaagagcggagcctgccatggaagcgaatcgcagagtattttcctgaaagatcggaaggctccctccaagtgcgctattgcacacgcctcaagggccgcaaggccggaaattctactgggcggtgttccaacgcgagaagcgattcttcatacagaggcggaccttgcgaggcagttcaagccgcaggtggcaagagcaagggcaccgaagaagatgtgtcaagaccgcgatacggtccacctcggcgcaggcaaacggtggaccgctattccccggtttgagttggcaatagttattagtctttgtcgaatatcagggcgtactatatatgctgctgctgcgacaatcggacgttccgattgttgttatgatctttttgcgcaatggttgaatcatcttatgtaattataacaaacgagatttttatattccctgctcaagtttggcagtcgtcagttattaaactcaccatttctagtttggtatcactaccacagactaggcgttgtcgtcggtttgtcaacaatctcagatcattcatcgacgaagtaacgtgaaacagttagcgtctctgtttccaaaccccagagtaatactagtccaaaaatggaataccctgccagtaagagcttgttctcatcagatcaaaagagattcgaattacatgtatttacccgttcgcccataaaagcatgtgcctcaatatagtacggatggacgaatggttcgaagttggatcccaggttacgtaatgtatatatgtctgtatgagtggctccctgttaggttgccattccgctaggcagaagggagatgagttgctgcggctataattagctggatcttttcccaagactggatataattatcactcttgtacctgaatccaagtttccaacttcgacgaggggccagggtaaatgaaatcacccatccatccatactgtatccccaccaacacaatccgcttaaccccaactccagccccaactcagcaaatcaaacccatcaagacatcgttacaacccaaagcagtgtctcatgtatcggttttgaaataaaaactaaataagagacagaatagaaaggcgagtgaaatactgtaaaggcaatcctcaatacttctttctccccttccccttccctttccccctgatgttcaactccgcaaaccccaactcctttaacctctccgcgagaaccgacgaatcccgcatccccggaaaatccttcgccggataaacacgaaacagatccgaccacgcctctgcaagaataggcatagactgacccgtatcctcaaccgatccccaattcattagtctgaattgaagccggtacgttccagccgatcgaattgaaagatcagtgaagatgaagaatgtggccggttgatggagcttcgacgcttggtggttgttgtcggggtccagagccaatgaagggctttgtgtgtgggaggaggggtgtgtaggggcggaaatggggtctggatctacgtcgacgtagaatggggacatgaagactttgcctaagaggggtgttggcaagacctcgtctgcgcgggttacgctatctctttctttttctctttctgggccttgcttgtcctgggaatgcagctcattgaatgagtctgatacgaggaataataagcagccaactgtgaagcgtgggtcttgtagaatgtcacggtcatcttttgattggtggccgaagtctgagaggaggatttggactattgggggtggatcgacagggcggcgattccagtcgctcgcgccgcatgctcgtgaggcgaggggctgttggcggacatggaggtgatagcgggatagtgtgggttttcttcggggtggtggaggggatgatgattcgggctcgtgatggaggagttgttcgaagccatggggcatgctatactttgtatttcggggccttgttgcctgcgcgctagctagcgctagtgctggagactgagcttctataaacgcacactggcttttctgagtaagcctggcccagtatagctgttgagctgctgctatggctgtatactcttgcgtgtcagtacaagttcctgtggtggaagaactcgtgcaaaggctcttcacattttcaacatggaagaatcgcttgaagtcggcaggcatgtacgggtatggttggctagcagatagagacggctcaatcgaaaataataacgaaaaggaaaggactttaccgggatttcaggtcgtgtgtctgcacccgaggactatattcgctgccgtggctcatcgcgggattcaatttttcctcatatggagcagagaaacacccacaccgctcacaatgatgcatttgcagtggcaattcacgcggcatatgtggatggttcatgtaggcattctcttgcaaggccatatgcctagcgtcgcttctctctggaagatgccctattgacggcgaccggggaccaggtggccctgccaatattgggcggtcatagaggatatgcggagataaaaagtgtcgaggctcgtgtcgcggatacatatgatatttcaaaggcatctggccggggtggtgtgggtgagagaccgggccgatataagatttgccgggtgtgggatgcccacattgcgacgacgggggtcctcggcatatatacaggacagataagactggtgcaggtgtacaacagtttgcgcttataatcaaagcaattcgcgcgggattcagcttgtaggtgttgaagacacccgcgggagtaatcgatgtctcaaaaatacaagtcttctttttaaatcatgtcaaagtgcaggtgactgcagggaatcgtgtagaaaagaaagatatatatcttggatctgcttggcgccaagtgaaggcaactaagatacatatactggatctgcttgccgccaagtgaaggcgactaatgaaccgctgcagggtgcagcccatcaacaacgtggcggtatgggacccatatgtaggggcactggataacccgttgggggtggggcaatgagcgcgacacaagttttagtgtcgcgctcttacttttcgcccttttcagtgtattcgcacgccctccttaaggagacaatgagaattgccttgatcaccaaatggcagaataggccactgatctgaggttcggcctataagtagcgacatgtttactagcctgtcaggttagtaagccagcgcggtcgccagttaatggacaaatgaccggtgctcacaatcgctagatctcagcctctgtctcttatttcggtcttcccagaccactccgtccactctccccatattacgagtttgtttaatgggaagatgcgtagcccgaagtactggctagcttattcgatgcggatggatgacatgttgcgtgtgtgctagaagcacgaaagtttcgttaccatgtattatgtaaccgactgattctggtaaacgcaccaaatcctctggtgataggatgtttcagataatctcgaccctaacgatggagcatatccatattacccgaccttcttcagaagacattctagtcaaccgactgtattcctggctaatacaattcatgccaatcactcgctcatcgtaaggggaaagacatattggaacctccccgccttcaagtattttcatgataccacccttgcctctctgggctatgtctcgtgacgtgagaccattatggaccattacagatacatctgctccgccatcaagtaaagctttggttgctgccatgtactcgagctcgactgcataatgtagcgggcttcggctctgatcatatcaaattatagtcgtgtcctccctggccgaccaagtagatacgatgcgcaaagggtttcagcgccagtcccacaacgaacactcaagtggcagcgctaaaatagaagaacacatttccctcctgcctcatgctctgacggtgcaaacatcaaccaggtcgactaacgcagtggtccatgggtctgtggaccttcatgtgcacacagcagtcgatctggacaggaggctttgcctgtttttccccgtcccgattcgatgaccacgccgcgtgttaccggatattggtgctagagttcgaggacgcttcagccacctcacgtcctccaagtcaatgacaaccaaacggccacccatgtcatcccatagcatattacgccattcgccatcgctatggacaactccgtgcgatcggagcacgatcagggctttgtcgcgctcttcgtgaaagaagctagaattctcatggttgatgacatgctgaagccgcgttccagaccagctcaggatcatcatctgggtcattaattcaccatggtaccaatacgagacccgtggctgaaagtctccaagacagacggggatctgatgtccttgtaagctcctgaggtgacgataattgttcacctcagcttgaaggcgatgctgcttctccactgtggtagctttaatgatcacagtgtatccatgtgatagaagggtagctttcacgaggtagcctgtccgaccacagacgtgcaactgttcgaacccaaggtctcgatctcgggtaagctgacgatgaagctggcgtgtgaactcctgaggtcccatggagtgtctctgaccaccgtggtgtttccagttggggcattttttatccaggggttctcggttgaccatgccgcggatgcaggcgatggtgcagtatggtcgtgtagaatgcccgtctttccgagaagtctgtttgttgtcacggtcgactcgtgtcctttcgcttcccctagttgattgacggttgttgcctaggccgcggctcgatcggctgcgcgatgctgctgcggcagacggtgaatgcgattcttgatcactgccgctgctttcagtcgacgagtgcttcggtgtagatgcgcctggttgacaacgagcgcgagcgcgagagcgtgtgttgtgtattttctgatctcgtttccagcgtgagggccgataattagaggcccgcgggtctttacggagggtttcggggatttctctcaacacgtcgagatattcgacctcccaggtcgttagcttatcgtgtgccgcatcgtgccattcttgagtcggaggttcgacggctagcgcttgaagggtgaacgcaagcacctgcccgatggcggtccggtggaggcgcaattcatcgtctgcctgcacgtcttgatttgggatacacaagaaatattgaacaattgtgggatcatctttcgggatatggaggaaaacaaaggcctcccctgtgcagatgtagccgtaccgaactccactgtcgatcatgtacgagaatatctgagtgaccacagcggcgacgaggcgggtggcataaaattcgaatgtgtcgccctcctggtcaatgacatcgctagccagatccatctggtgtagacccaccaccaattcggcgactgttaccttgtgcggcgctttaaactccactgcatacactggtatttgtcgttcatcagccgtaaggtgcacgcagaactggtcggcgcgccgattgcgtcttcgtgtagtaccatccctcttctgtctctccgccgctcctccccctcttcctctgcctcttccatgcctagtgttcgccggtcgttggggtgtccgcgcgtcctgaagattcatctgttccaggctgttctccagcgaagtttctgatgggtttgcgcgatcatagaaggtgacccgaccttggattctaaattcctgtcgaagaggttcatcgtctcccaaagccttaatgaccttttcgacaaagttatccaccgtgtctcgctcaaaattccgaagagacgcttccgaatagatcggcctgttctggatattcgtaacgacataatcgatttgggtatcagaagggaatagtgggcgcgaggtaaagccagcggtgcggtcgaatttcccccaaacttgttcttgtagctggggaaagtcaagccaagggacaatgtgcttggggtagagtcggttcactggatcggtcgcgtcgccctgagtcgtgagggtcgcatctgcctcaacttggatcgcttgggacagaaaattgtggcagcgatcgaggaggcgagatagtgtgttgggttgcactcgccgctctgccgcttcccgtgctagtctctcttcctcctcgcggcgctctgcctcttcccgtgcttgcctctcgatttctcgcgcctgtctctcttcctcttcacggcgctcagccgcttcacggagcctttgttgttcttcaacctgacgtcgtaattcggcgattgtctcctccatccctggttgaaaaaattattcagcagataatccaactaaacaaattgaagtcaacagagtaggggccccagctggcgcggggaatggaatgtcacgggagatgggcgtctgcttgtttacccgcttactcacccgttagctcagagtcaattagtgcctcaggcattaaaacacgttgaactttcggttggtttcaggcattgtctccaaaacatgcccgactcgatggtatctagatttgcctcgtcagtacataggtaaattcggtcctccttccaatcctcaaagtacagtcaccgtagcgagacgactatttcaattgcatcactcgcgaggcccacttccgtcctccaataaaggccatttgcttcgaaggatagctgcgttgtatgatctcgctgtgaggaatgcacaatgaagctagtagccagcaaaagctcttctaaatagagaataggcttaccttctttcgttgtccgtctgttctgcctaacacgctactgtatgctctaggctttgggggttagacatcatgcagtcattatccaacggacctcatcgacaagtaaagacgtacctgccatattccttgtcaggaacaggcttgcttgcttaatgctgatggtccttgattgagccatcaggccctgaatacacatcggccatttcgggggtgattagctcttatatattgcataagatgcctagtggaggcgaggtcttactatccagaactgcgaactccaaaccgcgaactccaaaccgagaaacttcaaactgccgacactcccactcctgcttaactctctaggctagccggcgacccaataccgtagttggcagcgctatgaaggttgcgtatggctggcgactcggccaagaaacccattttcaggccatttttggaatgagtcagcggcttgccttccattccagctcgcctgatctcgattaaaggcaagaccgcgggaccactaatgacgcagtgacccctctacggttcagacccgcatccagccgatgattggtttacaggaagatgactaaacatgctgttgtgacgtaactgtaaatatttccccagagagtgtacgaagtacgtaagtggaaaattgcaactaaattgctattcagaaccgcgaactgcaaactgcgaacaagccctttgaggagcaagcaaccgttgccatactgcgagtccagccaagcacagcccgagcgtagagcgacagtctgtggagcgttccccgcaattttaagggacttagagcccctatgaatagagacccattggcctagaggtttaacaacggaaccaaaggacgtcccaggacttcgttatggcattattgtaaaattggaaacggacaactccatgtttattgggtccagaaggctgactaaatataatggaacaatctagaacattgtaaatttggaaaatctgtgtggttttaatatgtacaactggggtgtcaatacttcagtggtagtaaaataagagaagtgaaaaaaaaaccccgtcatcagactggttccattggtattaaatctatcgtattaaaacaagagaaaaatccaaatttggccctcagggaccgccggctctgggatcccatcccacttgcagttcctgggttctgggcggttccggggaacgtggttggtgttcctggtagcccctgtcagagatcgagcatatatagtagcttgggtgtttggtcgctgaccaaacattgtgcctttttggccagatggcgtagtggtaaaacccaagcacccatgaaccgtcacagtttcttgaggtgtgttctgggatcacttgatccgtgcctaggagcgcgtctggcgttcctgggctgtggttggttccggggaactcgatcggcgtttccgggaaccccacatcttgttcctgtgtgcagctcgagtatcttgcatatatgttgaacctgtctaaaaaagtgtcatgtagaacgaaaaagatctggtatcgatgcgagataggtaatcagaaagatagagatgccaagcagttgcaagcaaatgaagattaactatatcagtttgttcaacaatgtgactaggctaaaacttcttcttgacctagaacatggatgcctattggttttgttcgcgagttcggatccgacagacggctttgcttcgatttccagtgaccacatcattttctttttgagttggtcctgttggaacccggatttccacttgcgtttgagaagtaatgatcgaatttaacacaaagtgattgaagtcagtgatttgcagcttagattgaagcgctcacattagcgatacagacagagccttcagctaaccccgaaatctagcactaactgtcatcgggagcacacgaccaagttccgccttaataatgacaccaacagaactgtcgatcccactccagatatctctaagacttgggactttgggctgtttatgtgcaagccttcaattcttgttgtattacgaggctggtgcagatcaggaagcaagtcgcaccattagaattaatcccgtgtttacgaaaatgataattaacttgatgttctcattacatacagcctcgtgtttctcctgaaataccaatcaattttttgaattacaacatttatgaagctaatgtcagtggaagagatctgggttatgaagatacgaaacgaaacgagggtacagcatggatcgaaatcagattcaccagctacacgcagagattctttctccctcttttgaaacgtcgctatacctattacggttaatctacccccgaaccccattcttggcagtattccagtacgtgtgtaaatgacagcgtaaaaataacatccgtaatgagcttgtatggtttcaacggcctctagaacgttgatcctgcaaaacaaagcaacaaaagggaaatccgctttgtcggtggttatttggccagaattcaaattcgcttcccctcaatatctcatcctccacagctccacacgagtcctctatttgcaaagccagagatgttgaagaagttttaaaatgtggattctgatcaagaacctctttattgacagccctacgcaagctaaatttcctgcgactccggggtggctccagtccaagtcatgaattgcccattagaaatggaaccttacaaaatctggatcaatcaatcatggtgtcagaggataaccaggtggtctaagtctattcctaggtgtcgattcaccagcaattgaaggatgaaggatattgcgtagatagccctggaggtatatattcctgctttctcatatgtaacatcattttaaatgttgagcaatcacttagcaaatgccactaatccccagccgacttataaaccgtctgcatgatttccaaccttggaaaccctgcccaatagaggctcttttacccaagtgattgcaatccatggatactgtatcactttacggatcagtatctcctctgaacaagatccactatacgaccaccacagtgtctattcgaataactttcctggaccggttgcccaagctttgccaatagtttccgcagtgccgcgcgatcctcatcgtcacattctggtgacggtctccacgcattctcaaggtctgcgagttctttgggatcctcaccttccatataaggcgaagggccatatccatcatagcagcacatgtaccgattgtaatacagcccgaccttgatatccctctcctgctcaaatggaatatccgggtaccagttactactgccgattcggaagtgtcgcagttttggtagtttctctgcaaatagatcgaaaatatggtgccatcgcttctcgaacgaaccatacaaagactcactgccctcgcggcgcagcaaggcatccgtaggtagagcacaggcgtctacattctctttcatcatacaaaagtcgtagaggacggcgcagtcatcgaagtagatttcctcgagggtgtcgccatgcttcagaatccagtcgatttggccatcatggaagaaacagaagtttcctagtgatagcgtcttcaggcgtggaaagaacagattggatagatccaggtgagggtaaaagcccgagtattcacgcgagcagagcgagagatgttggagagaaggcgcagcgggactcagccatgtcctaggcaactccttgaaaaacttgcggatttccggatactgatatgtttagaaaaagcatctcgatggaggatggggtgggttatacctcgagatcatgctcaggagcggcgtcatttgtctcgctggtaatgcttaggcgaagggacagtaggcccgacaggaccttttccattttcgcaagtgttttcggatctttggggttatccgcttgcaggttgcgaataccaagatcttggattgggtgccgtaaggattcgagaagagagaagagcttatgcattgcgtggaatcgaaattgaggcgtctgggggaagtccgtataatggaggtaatcccgatccctgctgtctgaagtaaaccccttatcgaagcacagaacggcggcgttcagccgaggcaattctttcacttgcggaacaagattgtcccagccttgcggccatttttgctcttctccatcatcatagtcctgtgcgcattagttgttgcttggagctggataaagatcatcgtacaagactctcgtccacggtgtctatgtagatctttcgcggagtccaatgtagactgggattgttcaaaatttcttgtaacccattttggcttgtctcgctgggctgcaggtgcacggtcctgaagggctgatcggtggccagctgtgatgtgaaacggcaggattggcgcagcgactttaatgatgaaagatccacattaaaaaatgtgcgagcgagccgttcgctgggaaaattgagaaggcgtgacatctgggcgtagtcgcaggtagaattcccaaattgatgagtcgaaaggggacatgtttcgcttagccctaggctcctatcgtggcgtccaaacttcccaattcggtaaagcctcaataaatcacatgactaaaaagtagactgcggtaggtgatctgattagagacagaagaaattacctgccttgatcttataccccgtatttgccttgagggacgatgtatattttcgtttacactgctcatgagttaaacacgtgaacttaagcgctatcatatgtaaagctgccacggaatactaaatctctgaccgaagtgaacctcacagttaaccgtagcgtaacgattgtatctatgtttaggaaagttacagccccgccatccgcgtaatatatggtgacagaacatttcaagatctcaaaacagactaaagcatagggggtctagtgtgtttcagaataaagttcagaaaagaaagcaaacaaatcaaaggtgaagctgatttcgagcggccctgtacgacgaacacgaaaagtcaccgccacgattattgagaccgagacgcaccaccagaccgcgtaacaactatggccaagagcaagaaatcgaaatccagcagagaaatgcgcgctctcagcagaagaagagaacccggggcaagccagtagcccaacgtgaagcggtgacttcggacgacgcgtcgactgagagcgacgacacgaacgccgccaatcttgtgaaagagctcgtgaaactgaggagagacatcaaacggcgagatgattcgcacagagaggagatgcagaaagtgcaagaagaattgcagaaagtcaaggaagaatttagcgccgcccttgcagaggttcaacaggagctgcagaccttggcagagagaccccttcccgaaccatgcgcgcggaacggccacgatgagatccttcgcgaagtccaatccttacgcgaagaaatcagcacccccgcccccgcaagctccccgtcctatgcagatgtcgcccgtacccccccactcagtcacccgagcaacatacggactctctcaacgtcgaacacaacaccaaccactttcaccgacacgctgtactgcacgatagacacctcgaagatgaccgaaagcgaaagtgagaaggcatccgcgggttcaatcagggccacaatcgagacagagatccggaagatggatgatcacactcactggcgctgccgcgcggtcactgtaagcccaagagataccaaccggatcagaatcgcgtgtcgcgatgaagccgaacaccagctagtgaagaaagtggcggaagcaaagatcggtgcgggagcccgggtgcttcgggacgagctctacccgattaaggtcgacagcgtcaagaggaccgcagtactggatgagaaccatgaaattctgacaggagcggcggcagccatgggtgaggagaacggaactactgtcgccaaaatgacgtggttgagcaacaaggaaatcgcaaagccctatggatcgatggtcgtgtacctaaccaaagggactgatgcacggaggatcctggccgatggatacttccatgtcggaggagaatccgggacaaccagcgtttttgagtaccgaccacgaccggtgcaatgctacaactgccaggaggttggtcacaaggcattccaatgcaagaagatccagaagtgcgcaaaatgcgcgacggagggccatcaccacagtcgctgtgatcacacggttccgaagtgcgttccatgcggtggaccacacgaatcgtatagcaagaactgccagaaactctacccgtcacgtcatgaataggtcactccggataatccagctgaatgtgaggaaacagggagcagtgcatgaaagcctaatgaacgacgaagatactcaaaacgcagtggcgttggcgatccaggaaccccaggcgaggaggattcaaggccggctcttgaccaccccgatgggacatcacaaatggaccaagatggtgccctccacctggagggaagggagatgggcaatccgaagcatgctttgggtcaatagggatgtggaagcggagcaagtgcggatcgagtcgccagatctgacagcggccgtgattcgacttcccgaacgacttgtctttatagcatcagtttacgtggaaggaggggaggcgtctgcgttgagcgacgcatgcgatcgcctgagaaaggccatcacaaaggtacagcgagatacagggacagtggtggagatcatgatcacgggtgattttaaccgccatgatcaactttggggaggggacgatgtgtccttgagtaggcaagacgaagcggatccgattattgacctcatgaacgaatttgcactcagcagcctgctcaagcgaggcaccatgacatggcacggcggaggacacagtggggactgcgagtcgaccatcgaccttgtcttggcctcggaaaacttgacggactccatgactaagtgtgcaatacttgggaccgaccacggctcggaccacgacgccattgagactgtatttgacgccccgtggccggtcccaaagtatcaggaacggcttctactgaagaacgcgccatggaacgagattaatgctagaatcgcgagcaccctggccgccactccgtcggaaggcacagtacagcagaaaaccgatcgactgatgtctgcggtctcggacgcggtgcacaatttaactccgagagcgaagccgtcgccacacgcgaagcggtggtggacaactgacctgacacaactgcgtcatatatatacatactggcgaaatcacgctcgttcggagcgacgggcggggcgaaaagtacctcggttcgaaaggatggcccaggacgcggcgaaacaataccatgatgccatccgtaaacaaaagaagaagcactggaatgagtttctcgcagacaacgacaacatatggaaagcagcgaagtatctgaagtccggggaggatgcggcatttgggaaattaccgcagctcgtcagagcagatgggactaccaccgctgaccatatggagcaagcagaggagttgctttccaaattcttcccacccctgccggacaacattgacgatgaagggatcagaccacaaagagagccagtggagatgccggccatcaccctggaggaggtagaacgacagcttcttgcagcgaaatcgtggaaggcgccgggagaggacggcctgccggcgatagtttggaagatgacgtggcccacggtcaagtaccgggtccttgaactattccaggcgtcgctggcagaaggctcgttgccaagacagtggagacacgcgaagatcataccgctcaaaaaaccgaataaagaaaattacaccattgcaaaatcatggagaccgatctcactcctagcgacactgggcaagatactggaatcagtagttgcagaaaggttctcacacgcggtggaaacccacggcttgctcccgaccagccactttggagcccggaaacagcggtccgcagagcaagcactcttgctcttgcaagaacagatctacacggcgtggcggggccgacgggtattgagcctgatcagcttcgatgtcaaaggagcctacaacggagtgtgcaaagaaagattgctccaaaggatgaaagcacgaggcataccggagggtctgctccggtgggttgaggcgttctgctcggaacggacggcgaacatccagatcaatgggcaattgtcggaggttcaaagcctgccacaggctgggctaccgcagggctcgcccctgtccccgatcctgtttctcttcttcaacgcagacctcgtgcaaagacagatcgacagccagggaggagcagtcgcttttgtggatgacttcaccgcatgggtgaccgggtcaaccgcgcagagtaaccgggaaggaattgaagcaatcatcagagaagcgctcgactgggaaaggagaagcggagcgacctttgaagctgagaagacagctatcatacactttgctcccaagacgcgtaaatcggaccacgatccgtttaccatcaagggacagacggttgtaccccaagaccacgtcaagatcctgggcttattgatggacacgagactcaagtataaggaacatattgcaagggccgcttccaggggcctggaagcagcgatggagcttcggcgacttcggggcctaaccccagcatcagcgcggcagctattcacctcgacggtggcgccggtcgtggactacgcctccaatgtctggatgcacgcgtgcaaggataaagccatgggaccgatcaaccgagtccaaagagtaggcgcgcaagccattgtggggacatttctcacagtcgcgactagtgtcgcagaggcggaggctcacatggctactgcacaacgtcgattttggaaacgagccgtgaaaatgtggacagacatccacaccttgccggaaaccaatcctcttcgccggtgtacagatcagatcagaaagttcagaagataccaccgctcaccactgtatcacgtagccgatacgctcaagcacatcgacatggagacattagaaacgatcaaccccttcacgctatccccgtgggcggaacgcgtacaaaccgacattgatgagcagcatgagtccctggccgaagcgggcgggtgcatgcaggtcgcggttagcagctctgcacgaaacgagctggtgggttttggagtggccatcgagaagcgaccacctcggaatcggaagcttaaacacaaagcgctatccatcaccttggctgtaagggcagagcagaatccattctctgcggaactggcagccatggcacatgtattgagcacggcgacgggactgaaagactacacgatcgcactgctcacaagcaacaaagcggcactgaacatggtagttggagtgaaagattaccggattgcgctgctcacgagcaacaaagcggcggctctgacactaaggaatcctcgacaacaatcaggtcaggaattcgtctaccaactgtacaagttgatgagaaaactgaggagaaatggcaaccagatcaatgtccggtggatctcaacgagtgaagacaataaactgcggagtctggccaaggaacaggccagagccgcgacacaagaagatgctgtgctgcagaagcaggccccaaggatgaagtcaacaacactcaatattgcatggtcccaagcagtccccaacaatgacctgccagcgaatatagggagacacgcaaaacgagttgatgcagcactcccaggcaaacacacccggcaactgtatgaccgattatcttggaaagaagcgagcgtgctagctcaactccgaaccggcatggcaagactcaatggatatctctatcgaatcaacgtagcagacacggaccaatgtgcgtgtggacaagcgagagagaccgtggagcacttcctatttcgatgtcaaaaatggacggcgcactggacggaactactacaatgtaccaacactcaccgagaaatatatccttctttctaggaggaaagtcgccttccgatgatcagaagtggacgccaaacttagaggcggtacgggcctgtacagttattggaattctttaagagtttatcaagttgaaatgatatgaggtttgataatggactgcaatatggtatgttatagctaaaagagagcctcgcgatccgactggttctgacagcctagtagtcttttagacacctatgatgtgtacttggtggatacatgggaaagtactgtgatgtcagagcaaagtaaactccttattgtttcctgttccttccacttatacaaatagttgcattctctcgcttcacttcttactatttgtgattcttctcaacaaaaaccaactagtcttcgcctagatcacccgagatttgtatcctcctaggtcgtctgcccagcaatttttgtcatgcttgtgatcttgaaatccatttattgaccaaataagctcccatcttcaaccactccgcgttttcttcaatcatcagtttttctttaagttccccaggaataaaattcagtaagatgggcagggttcgaataatctgtttgtattttgggtgcacaattgctatctcatgtagcaaggcttctccgtcgctaaatagatcactgcgatctctgaagtgatttttaaggaggggcaactgtgctttgcaaagcttcccagtcatctttagggcgccgcggcaagtgattggacccagtttcattgccttagacaatgttctgtttttgaatgaggctgataaaatacattggctggctttggagccgtgctgaccaagtgaagactttcgcactctgtttcgcctgcgggaattctcggtgtctttctcactagtgcgatgtagtgtggattcattctctcttttagaatgaacggcccgcttggtctgccactgggggaatgttgttcctaggttattttgttttgacaagcctctggcatccagggaaacctctggaatgccgacactgcttgcctctttgggcagttcaagtgaagtagttagagataattcaattggcgcgacagaagacagaaacacagaatgatcttcattatcttttttccttggtgtaacagaatccattgggttttgctttggggctcgaaacggtatgatgggcttccaggggaaagtttggaggagaactactaaagagagcgaatggatattcggcctttatagcttttggaaaggagatgggatctgcgtcattccaaatattagatgaaacttaaatatgagttgacaagaaagtaataccgattgagggatctgggtaagtcctatgtcgaatgatctccaagattgagaacgataaacgatgcaatagtacctcacttttcgcccggtaatattgtgatgtacgatgggcgtttgccactcttttagcggttgaccagaaaatgaacgttgcgatcaccgctagccctccctgaggtatgccgtgcttaatcgtataaaggtaattctgagggatcaatagttggcagtaattgtcttgtggtttcatcatattgcataatatcgatatatcagggaccgctaatagttcacccagacagagtttgttggtagaactatactctgaagggatctttatacagtggtagtagtagtagtattcatttacactgacccctcgcaaagcgatatgcagtatacgacggctatatatccgggtatgtacatatagattgatccactttctgacatgaacttagagcctcgtcacggcctatcgtggccaattgccgtttccattgttaggctgccctcatggcgcggctatagtggaattgcggatgagacggatacgaagtatccgattttggctgcatctctgttaggaaccgcgagaacgcgggcaaagcagaggctaagaatctggacagtgactgagttacagatgcggttttgttccgagttcgtttgattgagcgttggcttgccttattatcgagctggaacggtgacggtttattgtgaaaacgaagatgaagatcttcaattgtgagtatggggttggcgggaaggaaagggtcttgcactggaggagtcggtcgcggtatggatgtgacaggtcgctggaggacggaagcataggttgtttgttggttttgggacgaggaagtgatggacggtatcgtttgatgaggctggggagagtgggctgttggaggttgttgcggctctgggtctattatggcgggtagcggatgggaacggcagtccagattggtgttcaaccgttccttcgctgtagtagatggaatgggcgtggattgagtttgagactttgtactggagtcatctgtagtttgcgtactggactcggcggtaggagttgaccgtttaggggaggagaatgcggtggttgaggaggggggtttgttgggagttccgaggtggtgtttcaaatcgcacgagattatctgccatatgcagtcttcctcgtgtagttgttgcacttcctcgaacggggtgcattggaaggtggataaatgcttggtcgattggcaggcaaaacaacatgccacattgctgactcctgaaggtcggtaatagaagccattctgggccagttggagcggagtggccccagcaagcactattccttggaacgaacgagctcgggctgtgatggtggagtagtcgtaggtgattgagacgagaaagtaatcctcatcgtgagaatcatcctcgacgtgagaatcgtcctcatcatgagaatcatcctcggcgagagaaaagtcctcaacgttggggtattcgggtgagattgtggggtttgcggcttcgggggtgggagatggctggcttctcgtggtcatccccatggtccggtctctctatctctcgagtatgtccttggaatacagtacttctcgaaactgtatagggtacagtgtatagggtaccgctgcgatacagtacttcccgaaactggtgtcaccacttgcactcttcgattgtttctcaaaccctaactgccaagacagactagtctatattgggagttattccggagtatccttgttagtgggccgtgtattgtttcttacatagagtaatctggatatttagccgctgtattaatctgtaagtcgacctaattggcaccacttcggaagccttcgttccttcggcgagaaaaaggtcctcaacgttggggtattcgggtgagattgcggggtttgcggcttcggggatgggagatgggcgacgggctggggggtctggaagctgagggttcagccccacccgctggcttctcgtcgtcatttccatggtccggtcctaatggtacagtccctaacctctttatacagtggcggccgttaccgccttccatgttagaacagagaattggtcttacaaaccctagtcatgggataccctaaacctaatatgatttagtgtaaacagccgattttgtaccttctaggtggcaatacaaaggtttttgtttgaccacaaagattgtatttgtgaggtctagaggccctgattttgaagctgccaatctgctttggctatagattatatgctttcaacatggcctttaggtcatgcagcaaatgttgagagtggagatattattggctaattgacataacccttaagaaaagttttgtagtgagttgttagactagaatgcccctgctctagatttgttagtcgttttcttatacggtccgccgcatagagctggtttcaacccattggcaagctcttacaggatcaatcgtggaacgacccaccgcaaagccccgtctggacgtataaatagctgctctatgcctatgtcaactttcgtccacagctctatatactggtgcccctgacatgaatactatcatgatgcggttgggatttctctcgtcactttttctgaatgttgtcatcgcccgagctggactctccccagtgcggacggtctgtgaatttgattggagcctctgccaagccagtaataacggcgaaatgacctgtttctgtgatagcgacaaacagaaccagagcactatcgacttgaatgactgctttgttaaccttgatggagatctgagcccacgccaaaagtatgcaaaggcctatccgtatactatatatctggttatatttctgatgatatactaaatccatacagtggtggattcatggattcatgtggtggaataagtttcatgcccgcgcttccaaccttgcgggcaacctgtaaaccaaacaatcaaatcacgtctatcaatatgggtatgtttctctctacttaagctatcatcgttagcgtaaatgtcataaaggaactgaccataagccaaaatccaaacagacggggttttcactttcaagggtaataagttaacttgttccggctaggaatggaataaactagcaatttgttacagggccagacttgaagctatagggtccagctataaggcccatatgtttgatggatgtctgcctttattaaattaacggcggcctatatcgccttctatatcgggaatttagagagtttttcggaccattactacactaaccgctgagacagatataaatagcgcgtggtattttcgtctcgtagcctactcagtaataaataccagaaacttatctaccgattggcatggaatatataagaaccaaagttagacctgggtgatggagtgattacaatggacctgtgtttgtactgtgggattcactcttgaaacggatccataaatacataatcaactatatatggcttaccatatcatgtgattagggtttgaaagagctcctttatattgtttggcatggaaggcggtaacggttggcactgtatagaatgtaacataacgaagaacatataaagcaaggacgagcataactctggtcttctacaaccgcaaagcaaaaatatgattcgcttcatccacgtaacaggtaggcagcatggagttaccgcgaacactgtacctcaccaaggccaacttctagagtagaccatgaagcgagcgggcattttcagagagtgctcagtgtcacgggatttattatcaggatgttcgctaccggtcccatccgccctggtttcgaaaggaacttgtttatatgtgagcaggaagcaaggaactaacctttcaatgaggtgtaatataacgcctacagtaggttggttggttggttgatgctatttaccctgaaccctcgcacacgaaagttgaaaccctgggttgaaatacaagtgcgataattgatctatattgaaagatccagccacttgtagttgcctcatccccctgctgcctagcggagtggctgcctaacaggtagatctatacagatctatatacatcacatgaactgagatccaaatttacatagcgaggagtcaggataaatgaaatccatccatccgtctgtaactaggttttctttgtagataactagggccttagtacaacacgcctaggaaagactttattgcttatcacctgggatgagatacagagtctcgaaagatcggtatttcgagaactacaatcgcaagctgaatcataatttctgtaagtttttatcatattccattgtccagccattgtttgcttgctgttgcccagaacgcaagactaagagaggcgaatacactcccttctatttcactgataactcgccccagtcttgaatcatgaatcggcagaaaatcgtgatatttccaaaatttccgacatgtctgggcatgtggcagcagggttgtctgctttaggttgggtaactgatcctgtgcctctactggacgtactaattcgccgaaagtaaaatcggtgtaaataaaagatgattgcaaatagcaaactagcaccggaaatgctccccaaaattacagccacaccatggcttgacaagacccgggatgcgtcagaaccgtccgtcctcaattgttctactgtatttttcgtggcggtcgtggtcgccggcacggttttggttgaatccatgggctggcttttggtgatcggattgagcgtgctcaagtctaagtcgtcgaatttgggggggtttcgtgttgtttgcgtaggctgatgatgacgagaatttccaaacaaatgtgaagaatatcccagattcccggtcacataactaccgatttccttttgtttcgaccgagacacagcacctaaagttcccggaagtgtaactctattggagaaacccactgaagtttggccagaaaggctttggaagtctcctgttgaagatgaagacttcattgaagtaacttcagccggctggtgcaaagtggcttggtctgagggaacataaacgacaaattcagagcttcctgtaaaatcatggtcggaaccaactgaggacactgtatattgtgataatctcgcgccgccgttggctgctttcgcgaactcatcttcacctaaactgaaaggcagtaacgtgcgagagctctgctcttcaactattagtccgctgccccctagctcatcgtcaaccttgaaatattcgattataccgttttccttttcactggtagtggtgtgagtgccaggatatgtgagggtaggagtgtctatgtctgtctccggtggaagtgatcgaagcggcgaggtccaactttgggttgggctcgaagggtatagcgtaatcgattgcagaaagcttgtagcttttggagccttaacatcagacgttgtgacagtattagacaaagttcgctgtgattggctataaaaagatctcagcaaccatgctctttcaaatctagccaaacagaccatgatagaccaacgcttttggtataaaatcctggggttctgaacccagcattgctttctagcatttcttgggtgatagccttatgctaacgagtttggacattccaggacaaattgtggtagttgaaaagtcagcctttgctaggaagaaacgcagactaaataagcctattgtggtatccgcatttttcgaaccgtatggggtcgatgaatagttctgccgggcttttagtgttacactgccaaagggtacactgccatttgttcggaaactgaatccgtgtctgccattcaataaaactatgtagtttgtgggcgcccgaatcaagaacactattcagtaaggcctaacatagcgggtgacgtgacccctcaaattacaccttgtactaaccaccccgtcatttagccttcgcccttataaatgtattcggtgcaggtggattcatcgaaaatttggggcaggacaaccactgaagcctttacattaatgtcaaataatccacacgagtgaaaatcaactacacttggttctagatgcagccccaatccattagtgctcaaatctctgcctatctggcgcatttgatctagtatatgcaaatctatcttcatattacttgaagtacgctgaaaacttaatgaatcgccattttccgggttttcataaggcccaaagtatataaaaggtggggcactgctttgacatggcttgtcgatatctaagtttattcaagcccttatttctcggcggatggttctcgtgagagttgatgccctcaaagcatgctacaaactatcgctatctaggcgtaggctcaaagcaaagaggaaatcccgctgcttaattgagggtgttactttctgatgggttgtatctcgcttttctgtttgaaaatattagttggactcgtttgggggatatctaccggaatagcagatctcgttgaatattgaggaccacgaactgataaagccctctggtatcgttgtacgtatcccgaaatcactgcagcgggtattttacctcgtcagctacaagtatagccctagaagaaatgtcgattctggaatttggatacgccttttgttctcataccataaagcaaagcgctcatgctgcctttcctgaaaccagtcatttggttcatcttcgtggtcattttttctctggttagtggcttttgttaagctactgggactgatggataacctaattactctagacattcggtcttgtaattcgctctgctgagtataaaagaagtgtcagtgactctgaggatattgcgagccggggcgcttgggctaatagaaatgaagccaccttcgttaggcacttctcatagtcggtcccagagatgggagctctctgatgcaagccgtggtatgtctcatcaggctcgtttactgaatcatcttatcaaagttattagcgcctgccatccaccaatctaatcgataccacactcaacatcgacggcgccacagatcgcattagctttgacgagtgaccatttggtaacctgggcacagagatcattaatagttcggttccacttgtttacctttgagatggcttaggtatataaaaagatgtactaagtgaaggccagtacaagattagtagcaagaaaatgtgtagaaagcatagatgagccaaccacaataacgaagaggacgattctatcgtgggcagtggcgtaggtaggccgtactagggcaaatgaaatcatccatccatgccgtacaaatatcgtgtaaagcattttcgtacgatatagtgggattgctctaggcttcctaggtagtgaactgcgagtctcatgtgataatccctgaaaaggctggaacattccaaacaatcatgatgagccccaagcccaatacatggagaatgaccatagttaatctgcacttacaatatcgctaccggctctacacaatgtatataaacgtattcatggccgcttggctgtccacatcaacgattttctaactaacaaaaaagacacggaccgcaattccaactatctatgcgtacaatgatggctaatgtaatatgcactgttgtatggtatacacggtaccagtggtcacatgattttctgggtaccttaccctgtctcaaccatgtattcctagttttcgacatatcatgcagaacctcgtgaagtatgatccacctctatttaccccaactaatacatacctcatatagcaggactcaggacccttgaccaaactttgtcgagacttgcggcgctacgtcacgcctactcttagaaacccaggcgcacaaaacagctcgtgcaagcatgacgaggtcctcagtgggttggtttctcgcagcgacaagggggtgctataattattttagtaatatccagtaaatacgacgccacacttcctgtctacttcacctttctcaatgattcaatgggttccgtcgaggctgctgataagaatccgaaagcatccgagtcgaccggccactgatttaaatcgttaactccggcaattccgacatccttctcgtgcttttgcataagcgccatagtaattctaggaatagtattggcgtatattgtgtaggtctcagtcggtgagcattctgagcattgatccaagcaggctgtgagaaatgtcagcggcgcactcactcgaacgagccaaggactaaccaatctttactctgccatttgtgccgagcagtattccaccacacgacagtgactgatgcgtgagtccaaagctactgagatagcataggccgtcgagaatcttgtctgttagtttatcgacgaaaatggagacgataagacttacctgtgacattattgcagccagttctaattccgtgggatatatatctggagaagaaaccacattccacaaagtgagcgggagatcctcaacgaaaaaatacacagagtttgcatctatatagcagtctcgagatgagaggatgttggcatgatcgagacaaccaaatcgttgaattagtctttcagcatccgctttgggatactctcgtacagctcgcaattgagatggattggaacgatgggttgctatgataacttcccctgcgatgtcgcataacagggctggtcgatacttattccagggtgactcttgcctcacaatcagcaccgaagatatatccccccctagcctacaaagctgaggaagacgtaaggttctgagaggtccctcgatggactttttcatatgctggtgacgtggcgggcaattcctctttcccaaggatttgtattcgggacgtgtcatatcttctcactaagacaaacaaaaatgaacctgggattacagtagccccggtgggtgctggtggcttttaataaaatttacttttcacagatgccatgcatgcaggtcgccttccgactttactgcatgtctgggaacgttcttgactataaaacttcctttcgggagcccgtcgccagcctggttccagtagcccgaattacaatagtttggaccgctctcaattctaaccgctctcaattccaaccgctctcaattccaaccgctctcaattccaaccgctctcaattctaaccgctctcagtctcagccgctgtcggcttggagtgctctcagtttcttgactgcactaatgatgacctccccaaaatagtctcaaatccccggataccttaccttgtgtttggcacttctactagcaatactataacaggttgaattgagctgcgtgggggattgccacatgtcaaaagcagtaccagtgaaagatgttaacttgttttagtgtaattcaccaactaatccttacgattagttctaaaggctactgtcctaggctgggtctagaaagtctattacagcaactttgtcaataagtgagggtttgaaaatgtacccgaaatacggtctttggctacatgtacactggcgagcagaccacactcaagatgcacgtcctacgcatgctacctgtgttatggtcgtccatatttccaaccttctgccaacttagaaagatgcagcagaaactcttctctacgaaagtgttctcaagctccgttttccattcatgaggcttgcgattacttgtgtacaaaaattgcaaacacccctcagtttcctcacaaattttggtgttggctaccttgttatgtagtgtgacaaagtactccatagttcgttgcaacgacccaaaacagtaatcgctggcagcttcggtattgcttcattggccgactcatgggggccatagtcgggtggagatttgtggaccgcaggctgaggacgttgagcctacatgagttagagacaagacgttcaagtggccaaaaaaagaagcaaattcttactatttcctgtttagttgggacagcgacatcggggtgagaatagtaggtatagaggcggccgttcggcatttccataactacccaacttttgattgaatacaagcgccagaaatcattgtgacggcgtagaagattattgcggcgcttgcgcagctgttcttgttttatgcggcgcttgcgcagctgctcctgttttataggactttcaaccggcgccatttagaaacccgatgttgtcgaactgcagcaacaaggagatagaaagaagcggcccaggcctgttatccaaatctggatttatataggtagaaccattgctccagacacgatggtgttgagtgacatattgctttcagagccctctaaaaatgccctggtcggttaggaatcggtcaagtgtgttcgttcgtccgcgatcgtgcagcactacaagcgtaccaccaataccgaaatgagatggaatttagattcctcaactttttgcttcatctgtcaccaagccctgcggaaaatctgcattccgtcttgttgcaacaccaacagaaatcgcaaacgtaaatctaagtaaaccgcaagtcctatcaaccgctgcgtctcctggagatataagattgtagagataaataagtcgttttcccattcacctcatacgcaaaaagttccacatattcgtcgtcgctacgcttcgaggtttttcataattcgtatccctaatttgccaatcagtatgtatcataccatacatactccccgacgaggggtggcacggactaggaaagaacggctcaatcacggtaaggcccccattacatggcccgccacattagtataccgacagtctttaaagggttactagggggtgtttccacgtttcgagagagcgtccctaagaaggtgcctttccgcgctcagcaccttgtcctagaagcagtgcaaaaaatgttggagcaaagtggattccgctttatccaacgctggctaccccaggcgtgtcggtcggccgagtgggtttgtgcagagtcaatggagctgcacagactcttcccatttttgaaccaaaatagaaaatacgcatcttcgaaagattttcaccagatattggctaagcttcacagcctaaggcatacagtgtccaatatacgccatgcggcagtccacagaatcgttcaagatagcgaatccttgcttgaaatgcttcaggctgctgttgctttcgctagctgcataggcgataaggaatgtacacagcaactcgaattcctttgcagtactttgaataatttactggttcaaatgaatgagcgcttacaccatcttcagcagagggtattagttcagattcggatatgtcactcccgtccagcagagctgatgcaaaggcgtgcccttcttccagaggcagtccgaaggttgacagaacaaagcgaagacatgtttaatttacaggtacaaggcatcttaagaaagaacctattgttgtgttgatatgaggcaagcaaccaaccccctgctttacaagtctcctgagtgagatcttgtttcaagccagcgataggtctgtcatgtcacgtgatgtaacacgtgggcgacgcggcaggtaaagaatgaccctctgcgaacttgcaactgccatccgcaacgcttgtgattcaaaatgtccactgagattgacgaactacgacgccttttagcagaggaaaatgagaagacatccaaaaccaaccttcccgcttcccttgacggtgtccccaaccacttcttccatggtctcgcagttcagcaggataagacacgatctacgcgtggagatcccgccaccgcgaccaacaaaccgcgccccagaagactcaaagcctctggctctttcgcgaaagaacaagaggacatttagcggttgctgatgaattcttcacttctcttcataccctggaagaaactggagagacaccgggggcagcttgttggctcggaactaaaccttaatcgctttcttcgccagaccatggaggaccatgtttcgaaaattatcgaagaactctacagcgatccaagactgcgacagacatttgggttgagaggatcgatacgctttgagaaccactccaatacactgagccccgagtgggaacttgaggagcgaatgcagaatatcgatattcgtggtcggccacgacgacgttcaccgcgtccagctgcccgagaacaaagcgaaccaaggtggccggagaacctaggctccggcgcgaagcagccggcctcgtgccgatcaattctgcgtctacaacaaccccagccaatcatccgaatcgatccatcgcgatgcagctgatatcaaatagtacaaatctccgcataaggtgatactgggccgcatctatgaagggctggaggatatggatattgatgaggtggctgagcaacaagatgatgagttcccgaaacttccgttccgtcgcgcgattgctggactccttgtgcagccacatgactacattattcgtgctggtacggaaattgaggtgctaagtaccggcgaagctgatatttatctgcgaattggagaattccgggacgcttctgtaccacctctctgttccaaagggagacgttggggacttcaccggctggaacccccaatcaaatggcccaaatcgtcttcattttaccaccgtgggagaatccctcgccttcactctccaggcgctcaagttgtggcctcggcatcaagcttggagacaaaaagcaatcgactcattgccaagacgggaagtggtagtggcaggtattttgggcagtatctgaggaggtaccgtcttccaaatatcggccaccaaggacgaatgggttacttcgaatctccgatacaacggcgtcccaggcgaaacaagcccggtgttggtggttgccagccaatagacgcacaacgagatgcagacgaggaccaatctgaccctgatacgccgagatgggacccacatatatggcgcaatatcagacagggacagccaacgtcaatccatatggcaccagcactagcttcgagggagagggggtatcaccggtattactgcacgttgaagtgtctacgcggaacattgagccggggagagctagatcaggcttgccccaatgtccgtgaccatggaaagggcaccatgttataaatgcaaccacttgcctcaaacggttgcggcgtcagttgtttcagacagttaatgcagattgtgaagtactgggcattcacggttctcggggtgctcttttgaaagttacgctatctcgcacggatataatgtacctgcaaaatgcaccgtaccagagtttgcggaacagtttcggcatgaagctgctgtataggacaaacctctttaccttggaagcatcgaattggctcatccgtacagctacgacggtgccgcatatcttgaacatatgatgttattgagtccgggaggacagcctgtcgacctggcactgaaggaaatgagtcgagattgcttcaatgccaagatgaaggaatcgctctcagaaatgcaccttctgcatgttcttcatagagatccagccccgcgaaattggctgtacaatccagaaagcaaaaaggtagtatttatgattttgaaagggccgagatgatcctggggataacgtcgccaaatcggaagcggatgccacgtgatgggattgtttttaaacagagcagtgcaggcattgtgaggtcggaaggttcaaacgaggatccagtaaacgtagtcacgattccagcgatcacgctaagtaacgtagattatgctcggaatcttcgtgtcaagaattcgagatgatcctggggataacgtcgccaaatcggaagcggatgccacgtgatgggattgtttttaaacagagcagtgcaggcattgtgaggtcggaaggttcaaacgaggatccagtaaacgtagtcacgattccagcgatcacgctaagtaacgtagattatgctcggaatcttcgtatcaataatttcgtatatttacgcttcgtagccgtcggaaattcttttttttttccttggattgaaaacactatcatctaatggcgaattacattctatgcctaattacagccgtacacggatcagatccagcgtgtggtatgattaattcgtgagactttccactgtcgtttccaaatctgctcagcctgggcttctcgaattctggattgctcaagagcaacacgaagtttgcggactgcttgaaacacccgttcattgtcaagcggtcttgcctctggctcgaagtgatactgcaacgtcaactcttgggaaacatcaataatcgacattgtcaaattgagaagattttcaaaacaagaccgataaaactgattctcgttctcctgttgatcccgttgacaaattctttcttccttcaactcttgaagtgacaggcggtttcgtgactttgagcacttcagacgcgttcgggtggtttccaatgccatggtagaacctcgggccagtgcaatctgatgatccagagaatttatttctggtaggtcgtgccgaggaggaagcatcattggcatggaactcaaaatgtctttcggagattccggtgagcgactgtaaatacttgaggcatcatctgcagacggatgctgctcaaccgctttcaatggcattttggacagtatgaatggcggcatacgtttacttcatacctcgactatcttatatgtgtgcgaagaaccaatccctgagtaggcgcttacaatgtaaaggctgaagaccaatccagtgtcattttcttgcgggtcactcactcattttgataaagactccattttcacgttgctttcgctttgcggtatggcggaatattgatattcggaagcatccttatttcggcggccatagtcgaggaagataatacggaaataagatacaagatcaacaacaaatatacagtagaagcacagatcaaagaaaacgcgatgtccagctaaagcgttctatacggccttcaattgaattggataccatcacggggcagcatggggcggacaacatcagtatccgtttctgtaaacttaggtgaggggcaaatgaaaatcatccatccatcctttcaagagaaattggttagttgaatgtggttgactgagggagtgattggtttaaatgtggttgattgaagagtggttgattgaagagtggttgattgaagagtggttgattgaagaatggttggttaaagagtggttggttaaagagtggttgattgaagagtggttgattgagtagtggttgattgaagaatggttggttaaagagtggttatgtgaaagagtggttacgtgaaagagagcttagtgtcatcttcgttgaatcagctagactaacactgtatacttgaccctgcaaaggcgcaatactgccttgtaaagtgatatacggtggtcctctacactatcctgactcctaactctgtcttcataacatatatttcaatcaaacatttcaattatgcgccttgaaaccccttccgtccttggactaaccgcatctgctctgtggtcagttacttactacaccacaactgactgttcaggcgcggggaaagaggttggttggaggttacgaggctgggtgctcgactctggggaacagcatggaatcggtcatggtctctaccgatggtgtcaacaacgttaccttgagcacgggtagcaactgcaaccctctaatcccaagcggtgtaaccgacctctgtgtcaatgccgctatccgttccttcttatctttttgatcgtaagtcatttttttgtgccatccccaccgcaaatatatctgcaaattaacattgcaaggtttattaaagccctggaaatgcgcggggtgggtgttgatagaggctcagccaagaggtcaagatgggcttctagaaactgcgtgtcattttctctatatatagatctcagttacatgtatccagacgcctttgcaattttttccattcgagaccattgtagcaatctccaccggagaatccaaggaaagttgcgctcgcagttagtttcagcatattgtccttttcttgttacgcttcagtgtcatgcctgtttttatttaggggttggtggtcatattgtgggccacaacgatctgtcagtaagactatttgccatctacaaatagtaggtatatccctttcctcatcgacaataccttcttctcaaagcttgttgggccaggccatcccatcagatacatccttgccactctttcaccatgcacttcatcctttttttaatattgagcctggcgtggctggctaatgctacctatattccctccttggtcaaggtcaatgcggctgacattgctactcgtggcgttaacggatatcgttccgtcgcatactttgtgaactgggtatgaccttcaaccacatattccaccataaaatcaaataactcaacaaagtctgtcagggcatcttccaacctcaggacatcccagctgagaaactaacccatgttctctacgcatttgccaatgtccgagcctctggtgaggtgatcctgtcggacccttggtcggacactgataagcactaccctactgattcctggaccgataccggcaacaatgtctatggctgtatcaaaaagcttttcctactcaaaaagaaaaatcgcaaacttaaggttcttctgtcgattggaggctggacgtactcttccaacctcaggctggcctttgaaactgaagcgggacgccagaagtttgctggcagttctgtcgagttgctaaaggacttgggcttcgacggtattgatgttgattttgaagtgagttttccatctcgttcacggtttttgatgctaatgtcagaagtatcctggaaataacaacgaagcggaccaatttgttgataccctacgccgtcttcgtgaggtattttcatgcttcttttatttatgggtctgtaaaactaaacatattcaggccttggatgtatacagctacgccaacacaggcggctatcacttcttactcaccgctgcatctcctgctggtccgtatcattcgttcaaactcctcaacaacgctaacctaatttataggccctgccaactacctgaaagagcaccttgcccagatggatcggtatctggacttctggaacctgatggcctacgattacgccggaagctgggacactgttgccggccatggcgccaacctgtttgcatccaacagcaacccagccagcactcccttcaatacggaccaagcaatcgattactacacctcgcacggagtggcctcttccaatattgttctaggtatgccgctgtacggccgggcgtttactggcaccagcggccctggccaaccttataacggtcttggtgttggtggctggagggatggtgtgtgggactacaaagctctgcctcagaccggctgcaaggtcacaaatttggaccaggaagctgctagctactgctatagctcggggtcgcgtttgttcatcagctatgatacccctgaggttgcgcgtaaaaaaggtgagtacatcaaatccaaggggcttggtggtggtatgtggtgggagcttagtggtgacaagcaaggtgatgagagtctgattaccacggtatgtttcttagtccactcgcatttcattatcttacttactttaaacttgcaggttgtgagtactcttggaggcactggtgctctggacaagagcgataatcagttgagctatcctaattccaaatacgacaatttgaaggcctgctttgagccttgatcaacttgcttgctcaataaagaattaaaggctggcagctggtgcattgcatccaaagttgacacaataaattcgccctcgcgctcatctacctgcactccatctaccaccagaattaagttctaactagtgcgagataaaataaaactattgcctttcataacagaaacagaaactcactttctcaaacaccttttaatatctgcttcagattttgtattgttggtacgtcgacacatttcagcttgaaggtttatcctgcgccaaaatttccacaagcagaggggattacaatgaacaatacaaggaagcctgcacactggccaagggaatcactatttgtgctgggaagaataagttgagatatcttgatagaattttgaaatggacggcaaaggagttggtcaagcacagaagtagtagtagattatttcattaccctgtcccctcccaagttgatttaaccactagaccaaaatacgaatccgtacccagcctagtgggttgtggtttagaatccaactgtcgaaacgatatgcagcctaccgctactatatatatcttcctatgtacatgtatcgtgtaccacttcctaagcgaacttggagcctcgccgaggcctgccgtggcctctatgccgtcgttgtgtttatgctgcccttatggcgcgcggctttgaaaccgttgcgatgcttcagcaaaatccaagacagcctccactatcttggttcgtgatgcactgtcaatcttacctcttccttcttctcctggacactgtacagtaagagtcgaaatcagattcccctttaggcacacaccccttgtttctcggctcgtatccgaaaccacgctaaagaaatgatttcaacctgctcgtaagaatcacctccattccgagccctcggaggggaccggagaactttcaccagtactaaaggacctctgaacgtcagcctaccaaacggccaaaagcatgttaaagtcattggtgcctaaggcatgaatccactcgagccaagggggtgagtaagctggtttacttgagggagataagagaataagtgccaatttacagtgtgtgtgtatgtgtgtgtaattcatttacgctgacccctcgtcgaaacgatatgcagcctaccgctactatatatatcttcctatgtacatgtatcgtgtaccacttcctaagcgaacttggagcctcgccgaggcctgccgtggcctctatgccgtcgttgtgtttatgctgccctccatatacagtattggttttttatgttatccttcaatacaaaacgagatgtaagaaatgctcattcacctcctgcatgatgcacacgtgtagcttcaactatataaggcaagatatgatgtgaaaactttccggcatactgtactaaacctgataagctctaattaactagcctgcggctcgcactggcagagtagttctatctacatcagacggctgcagattcgcaagagcatttgcatgccggggtaggcgtgagagttggagagtgatctgcaagggatatcccagtagccgatttgccggctgaaattaaatccaaagatggactgtctgtaggcgtcgacgtgaatatcggggttggagattgatcagcacggagcgtctcagtagccgatttaccgtctgaaataaaagatggactgtccgtaggcgtcgacgtggatgtcggtgttggagattgatctacacgggctgttccagaagtggacgtgccgattgcagttgagaacgaggactgactgcctgtagatatcggcgtggtcgtctgagaggaacctgtattaccaatgctacacccactgggcaccttaagaccgttttctagcatacaactagacgtgtctccctgtcggttgaggaaagacacagtgccgtttttgttgactgtcacccaggcaacctgctctccattttcagtgccacatatatcaactttcaccgacttatcgtcggaaccggcaccaatgaaacctaaagagtgttaacaatagcgtgagggcctttgattcgaattggatactcacccgagcaatctttgcctttcagcttagcaaaggttgctgagtagcctgtacagccgtggttattctgagaccacactctacagttgttctcgccgtcattgtcctcaataatagccaaataactgcctgccacaacattcccgataagtaaaaggcagttgaaggaacgcatcctggactatgcgcggcttcaaggcaatcaagtgcgatgatggtgacgactggctgggaccgaggattatttatgctcgagactgaattgtgcgctgggagcgggaacgaagctacagtagataatggagagaaaagtactggcctcagaaaagaggtgataagactgtctagcatgccacagattggacagcaaagcgggggtaggtcgtccaagtcgtggttgtcaaagaacatacgttaaggcgatcccaagaagcaattcgactactgtagttgggcccgcaatttctgtttgcccctagcatgtttccttaccactcatcaattatttgccctgcaaagtatgtatctaatgtttaatgctcactttatttcgatggtgcaaagaaccgtctgtaaatttagtgtcttcaggtatttacattaaaccggaaatgtgacggttctttacagtgcgtctcgaaaccggtgcaacaaaaagcgctcttcgacaatcttttcggccccactgccaagaccttagcgcagatcatttattgaggttaccaccacaccgagtttaaatttgctgcggtagccgatcagcagtacagtaactatcaattttacccgatatccaaattatatgaaatatttcaacgagggggaatacaatgctatacaatattcattatagagatcctcaatttagtccggtcaccttaataaatgatctgcgctaaggtcttggcagtggggccgaaaagattgtcgaagagcgttcttgttgcaccggtttcgagacgcactgaacaacaagaatgaggtgcgtttctctttttgcattgtgattatcaaatacactgccaggtggtgcactggcgcccacgtgaagtccagtatagacaaaagagcttttagaacaggtacagtacaagacaacaagtccgctttaaaatcacacttgttcaacagttgagacagcgcaggtcaggacgcatactgtaacccgctacactggcagctccttgtataagttaattctttttgattcaagcaagttgaatggagaagacagagattcggcatatttattgaaaggcactaatcgccattgaggtacgctcttcgaagtccatttctcgatactgagcaggttagcaagataagaaaaggatatttgatcataagtctgcatagacgttggtcgaatcccaacttgttctcgacgctggatagcttctgtaatggctcttattaattgaactattctcatatcgcattactgtgcggtcaacatgccgagggcagataaatcctagagcggttaaagttgggtgcggtcaaacccaacggtctagattatcttaattcaaagaccacaactacgtaccggtagacccttgagagtcgaggctggttaagcttgggtgtcatcaggtttaatcacgtttcatgtcgtgaatgctgaagagtgctcctaatcagtggcatcttagaccaggtaagcagtatttttcattctatatcgtaaccacttcaacagatggccacgcgctaccccagttacatgtaggttgacgaacgaccagaaaaagccctcacataacccattcgacatctattccctaatagccccacccctaccaacttcaattcaacgtttacaagctcgcttgctggcataggcaacatgtcgaggaattccttcgctattacaacgagtctgttggtctaaggaggatcgcagatcagcttagtctgcaatatatataagggaagacttcttgtgctctaccttgcctttcaccatacatatgtacttgatttcctctgccacttcttggctttccatttccgccttagtgctcagtccttgccgctttttgctcactgagtagaactgagcacgcccctaagtattacataatcacaacgctcgctcactgagcatcacctgatcgttacataagctggatgactgactcatgactcactgagcgtcacctgagcgctctgatttgctcactgagcagcctgatcttacttacaagcttgacctgagcgctctgactaactagctcactgagcacgatctgattattacataagctcaaggacttcacgtattcggtaagcgagctgcgcgcgcaagccagctgcgcagcccaaaacacatagtaaaagtgatgcacttgtcatttatatttcaacaaccaacgtttttatcatattaaatttcttgccgatagcaaccgataagcatttttagtgttatatagcagtttcgcctagatcaaaaacatgcattgtcatggtttcaaaaaatacatcgctacttccaagaaatatatatttatcgatcatatctctatcaaacacctattagattcctataaagtctagataatagctagatgtcatataataggctataaggaaaagttcatatacataaccgttgttgcaatatcatattgtaatttatcgcttttaccatgtgttttgggctgcgcagctggcttgcgcgcgcagctcgcttactgaatacgttagttaacgtatttcactaccgagtggccacaaccaccgagcgaccatctctaaaacacatagtaaatacaatattttataaccttatatttcaacaaccgcgttattatatgatttaactctcgttagatagctattgataaggattcttaacgctatatatgaatttcaagaacactggaatgctataatatcatggtattaaaaattacgttactcaaagccagaaatatatataacgcaatcacaaagtcataaatattttctaaactccctagagaagctatatgtcacctaaaaagcattaggctattaggaaatctcgatatagactaccgttgttgaaatatcatgttgtaatcaatcgtgtttactatatgttttggagatggccgctcggtggtagtggccactcggtagtgaaatacgttactcactggagcaaagcgggcgcggggagcagctaagtcaacagctcacctcaataaaatgcaccacgctagccccatccaaatgcagttttattcaccagactcttgaccattgtcccctcaacgaaaggctggcctcatcaatttggcggtcgatcctggttatttcgcctccagctgagaggccatttgatagtagggctacatttattggttttactattttgcggctatactactattcaactcgccgagtctcgcattctacaatactatctctacatagttgcggaagatatccagccctcaaattttggttctacaatctcagaagaccccaattaagtggttcgtaaattcagtgtagtgttttattctcaaaattttgtcattatttttctttcccgcttgaataacaccggcttatcgctcttactgcctacccacttgctcctaggaataccacttcagctaaaaatattctagaccaatcgatcatgtctactgaatggtctagccgcccatgacgaaatttgcggcccctcattcgcccaacatattcaaactagcaatcagaaaatatattatcctagctgacttcctaggagctccagatctttcgctgtaaatgataccaatcctaggagcttaagtgctattcgcgagaaatatgactactaatgctaagtgtcaaagcatataaataggaccccgatccctccttaaaggaaaatatcaggtttcaagcatttctcttcaaggtcccgtaaagacttatcataagttcaagcaaccaccagcattctagtccatcttttattaggcccttagccaaggcaaaagcctaactattatacagattttctaataccgcagagaaaagcgataacctggtcgacatctaacatttcccattcgataagagttataagacagtttcctacaaattccagagctctaagtttattatatatggtcaagacctaagtaggaagatataagtgactctcattataccagggggagcgcgagagtttacaaggggcttatggctgactaaattcagtagtataaaatccactaaaacctaagagaaaacagatccaagctttatttaccagtctaattacacgtactaaaacccactttaattgcacatactcttttatcattaagctagacgtaaggagtaaatcgggtatggtatgcttccaccgattaagctagactaacctcccacgtaagcgagcttaattagtgatacccattcttctctatgaattgccaggtaccgctatagactagactgcggcacgatccacaatatccgcggatattttttgatatccaagatccgcagccttgcggatttggatatggacctcatgtccattggatatttgcggatatccaatggatatcaaacaatacaaacatgcctagactcgtgacctcgaggggtgtgcattaattttatgttttcctctgtatttttcgtgtaatagtatgttatgtcaaataatcaaaatctggatcttttgggggttgtatgaatttaaatcttcttattcattcatatatactatttatagatctaactgtgaagggctacggtcgaattgagtcaattaaacggcgcctgtatgctgtttagctaaagtttaggagttttactatgtaggaactccacgatagtgttatacattcttaaagttgtagggtggtgagcgccggtagttcctgggccccagcgcctattctctgacctcggtcagaaatcctcttatagcaggggtctctccctcttttatgaccgtgttcagaaacttgggctggggggagactggcagcgtgcacgggtaaagcccgagctctaatactggcactatcccattatactaactggaagccatctggtagccttggctgttttcgaatccgccctgaacggcctggtatgctcctatccaccggtatctctggaagctcatcatcctcttcaacagcgtcgtatggtcgtttttgaggttgttttccttttacccgtctacgtcgctcggcactatcatcatccgagtcattatcaccgctctcagtgtgctgggtagcctcgagtccagtctcttgatcctcctcctcgttatcactgataggctccaagacctcaagctgtggtaatgatctccgggtttgatctagcaaagcagcttcaccttgggatagatactctttgataatccctagctcctcatgtcgaagatcaaagttggtagcaaactgatgcagcatcaggccacggattgtactcggcttcaattgaccacgacggtaatgacagatatcacgagcacaattgaatagtcgttcaacaccagcaccactagcagggatagatagaatgtcccttgccatccttgccagggtcgggaagctctgctcatgttccttccagaaaagtcgaggtttctgtcgctcagttccacgagcaagatatcgtgcaatctcgttgtcatctggttttgcaagctcttccaatggctggttttgcgatgcacaagcagcatcaagatcacagtcatcattctcatcaatggctactccagaagtctccagtgccgctaggtcattggcattataggtaagcatcttcctatatcgatcaaactctcggtttaggacctcttgataacgattcacataatcaatatcgccctgccaatcagtcgaggaaaagtaccggaccttctttgatggagagaagattgttgctagagcgtagatgtcaccataaggctcgtattcggtggcagtgtagtacttggagagctttttctttgctgtttggagtgcccgcaacatccgtttcttccagatcacacctttattcttaagcttcgcctcggctgcatcgagatgggagaaaagcttgttgtagatactgtagatattgtgtgcggtaatatccttggtctttgacagcatcattgtgaaatcaaagaagggctttgtcagaagaagaagatattcgacttgacgccactcttcttgatcgagcttgaaataaagatattgatgatcagtacaatactgatcatagaatggctggagcttcttggcccggttgagcatcagaaatgttgagttccatcgtgtccgaacatcttggattggaatcaatgcaggctccggctgcagggccataaatgcctcccgacgttgtgggcttgcattaatgaagactgctagtcctcggatcttccatacttttattagtctagccattataaggatctaggggtagaagatatacctttttcaatgtatctgtgatctggataccgccggagatattgcgcttattctagaaggagtgggttttttcgtcagaccactctaactcgatctccttattacttggcactgccttaagcttcccaagaagctcattgagactcagttggatcacatgcgcgatgcatgggacgcggaagatcgagatatctgatgaatgctgagactgaaggttctcctggatactctgcatcaaagtattgttgttggttgcgttgtcagtggtcactgacaggatacgatccgagataccatgttctgttaggatctgggtcacggttttactgagattttcaccagtgtgggagccatggagaggctcaaagcctagaagaacctcacagtaatcccagttatgatcgataaagtaaccagtgatagccataaaggcctgctggaaaggagaagtccagcaatccaaggctatcgatagccggcacccctctggaagtctctgtagaatccccttctggttattctggactgtgatatcgagatgacgtcgaatggttcgtgctgatggaatcgtaagtttagtggatgattgctgagcaacctctaacatgcggtggaattgggggtgttcgatcactcgaaagggcagatgtgcagttgaaatgaatctcagaatagcatcggagagacggtcttgggtgaatgatatactagtggtacctggctagattgtagtacttaatgttagctgctaaattataaagaacttgcctactgtagtaacaccagttaagtaacccggttaacatatcattcttttgataagctggtcgattctcgggccacttttctttgaacatgctccagttttgaggtgcgctgtcataggcgaagaaccagcacgccggaatcttggatggccaattgtacagaggcatgccttacacataaccttcggctttccatttttgtcattcgcaacctggtagaagctgtcccagatatccgatttgctttttgattcccatcgaattgtgttctttacatcagactgagatccatactcagttgtaagccaccaactaacgaatttattccgtaagtcctccatatcatcacacatagaatcagatggatataaaacccagtgcttttgaaggggtccgacgcgagtaagggataagggcgcaaaggttgaacgagttgaacgagtcggcgatatcgatgggaccggtgtttggatacccaaaaaatcagagaagttgtcaggataaatccgatcagaagctaaatctatatccgaattggtgaatgagaactgtgattgagacattgagaagttaacaattataacatgtaatatagtagggtgcttaaaagaatagagaggcttacatctgaactagtagaggttttcaggggtaaagtaaacatactaggatattctgacttagacttgcttttgatgtggtttacctagatgattggctgtgttgtatattagtgcggataattggaggatatcctgcggatcttgaggatatcttgaggatattgcggatatcttgcggatattttgtggatatgttgtggatatgttgtggatattttgtggatatccacaagatatccgcaagacctcgaaactcgttaagtccgcatttcgagaacttctatctcggatttctcaagttctagtagtcggaacaaattaaaaaaataatcagtagatagatgggacttttagcttttatttgagcctaaaactaaaagaatttatctaataataacagttttgattttccatgttctgtttcctacgaagtttattatggttgacagtaggtaaatatatatttctacgtgtaacttaccacaaaatcgtcaatctacggccacctttacaatataacgtcggactaagaaaactataagaccacctacaaatactgtataaggagaccttcgatacatgtctatttcctaaaatttcaaagtgccgaccgtcgatttaaggggttggttctgtcaggactaaacatgcgtttatttcagtggtaaggaaatattggtaagctgcattaagatcatgtgataggctataagggggaaagtaagcgagagttatgctagtgcggatatggatatgaactcatatccgcagtgcggatgtggatatcaactcatatccaatatccgcaaattgcggatataaggatcgatctgatatccattggagcggatatgccgcagtctactatagactaacagctataagggatctaagcctttcacaaacttagtcaaaactaatacttatctagatgagacttatacggcacaatactactacattagaaacccagaataccctaggtagagtttagtattactacaaaaacacataaaagataagccttcgccccctcctatcactaataagcacgattccttgtgactattaccggccatgccataaaaatcaagagcctcgtttaccagtctttagtctatatcattccactccttttaccccctagctttaccttgtctaactgggcttctgctgtcgtacaggttgccacttcccaacccctcagccagagtaaaagcataacatggttctttatacaaattatctgatatcgcaaagaaaatcaatagcctaggtgatgtcgagagcatttcgacaatcgcttagtcagggctgttctggcttcatatttggtacaattgctcattaattaccgtcataagtcaattaccaaatttctgtccaacctacacagccaccactttaacacagatcagccacagtgcgtgaagcaactataatttataaggtacccgaaataggtatggctatgtataatactataatcactcattatcgttgcggcttataccacttttggcctactatcacatcgaatatatataaatcatagggagctatctaacaaatattaatttatgaaattttcctagtaaaccttgcttctaaaggcttttcagaggaagatatcgtatttaaggctcgtgttagtgttcaagctcatatagtagcttaggtgttttatcactaaccacaaatattgtgtctttctggcctttaacgcctctgcgaagcctaagacagcgctcgttatcctgacccgcgagatggtgtctggtttacctttcctaccttcacttgagcctcctagcagactcgatatgctattaaacgagtcccgagcttcactcctgaacttccgtcagatttgcctcaggtttggacagtccaccaacatacatatgggtaattgtttcttgtgtgctgcactcgcaatgatcgttcgtcgaggaatcaataggcgttagcgtacgtagataaccagttgtgtcctgtgggtagctgagttaatatatacgcacgattcctaggcagactgccgtacaatcttctggtgtagatggccggaaatgccttcagatcactccgtattctcgaaacccaatgcgttaggttttaggtcgagacctccgacctaaaacttattttgccgaagtctaacacggtatatctttaccgcagctgcggcggcggtgtgcagtttccacctactgatattattgtcgttccagcagagcaacttagactccaactaaagaagaaaggaaacccagtgaaaaataaagaagctgaaatcacggacgctatggcgaaaagaatttttccaagcccacgagatctggagcaaaacgcccacaagcggcggaaagtgttaggattgcggaaacttggaacatgacttccatgataattcaatttttcactttgttcatcgcagactcttagagtgtatttgaaggccacattagctaaggcgaggccctataatacacagagtactccgtgtacgataatcccttaagaattcgactaaacccatataatctcgactccctgcggcgccgggatggctcttgtccaagtcgtgaattgtccgttagattccttgccacgggattctaggtttttaccaatttcattattgaatatttttcatttctttgaactttttgaaaccactctaactctttttctgaccctaccattcacaatacatgacagagtacacttccatgtagccctgttcgcatgttccctggtcgccattgccagaataacaagtagcatcccgatatccatcacacacaaacttgccaaccttcactccgggtttgcctataggaagatttgttccttcatatttgcatgatttgccataagctttgaaaccgctgtctccattgtgaatcccgttaaaagagccgtccttctttacaaagtcaggagggaaagtttcagggcaacctttgctaccagtggaaccctcatagatctcccattgagcctcactctctacgttagtatggtagtagaagagctcgatatgcccagcactgccgccactcgtcggggcaggcccagttgcagtggttgtcagcccctccagaacggacagagatccaaacatggaagagaggaccgattcttgggaaatagcgctgctcagaacctcggcggggtcttcagttgtcgtaggccagctttccatggtgatcccatagccgggcgcaggtgttccgatgatcttggtcgacgatggggtgaccgagcacccggtcgtagtagagcaatcgatgtcacagtcggaacctttaatgcaaactgtagagcacacttgcgctgtttcagtgctgcactcatcctcatcgtcgccgtcagagccaatcccgctaccagtaccgccactgctgccgccgccgccagatatactgtcgaaactaggcgggcagcccaaacagccgcaccatggggcacagccgtgaccgctgcctttgctgtctttgctgacggtgggtgtgggactacccgaggaccaagtaattgtggttgttcccctgttgatttgagtgtccttggctgtctgggtccaggggtatggaggtggagtgagcgtagtggtggtgctggttggagtgggacctgatccgaatggagggagtacatataccatcaggggcaatgtaatgctgcttgtcatctccacagacgaaggggcagtttggctcgcattgatcgatactccccacaccggaatttcggtcatggtagctaaaacgttagtccgaagctctataacaatcaggttgaagatggatggcttacatgctgggaaagataccgtggcatacaccgttgttttcttgtatccccgataagtggttgtaatgccttcggcatcagttgacgttctggtggtcaagtagctctgggtaattggggtggtccattctggaaccttgagggtcgatggagattcaagaggcagcggaggtaaaatgatggagcatgggggttggcattcaacgaccggtgaagggtcatcccagatggaaggggcaatatacacatctccagatccagatccggagttggagcccgatttactggagtcttgttccacacaggctccttcaggacagtatccacgttgacaagtgtattcacacatgggcccatatattgtaacatcattccctggggcagctgtgccggttttatcggttgtaggagccatgacattcaccgcaccctgcccagtgcaagtgcacgcgttcattggacagaagccatgtgtgcagctgaagtcgcagagaccagcaaggttaccctcgccagttcccgatgtgcaggctggaggaaggaagggcgacacagtaggtacagtcaacggaacctcttcggtgccacagctggagggtgggcaatagccaagattgcagtcgaagttgcaaagtccactatagctggccccctcgcctgcgatgggatatccgaccactccggtcgagttgggcttcttgtatcccaagcccatcttcgtgcaggtacaggcgccaagcggacaataattgtatttgcaggagaactcgcaaagaccagcgaagttgtgtgcgccagtgccgttcttgcaactctgatcggacagttcttgcttgggcgaggttgacaccttgttgccggttgcactacccacccaggcattccagttctgaatcccattgggacagcctgacgagattgactcaccttggatagtggtgataacaacgttgttgcgcatcagtgacactgtcacaggtccagtacgaccgtcaatatgctggctgccgtggtaggcaccgatatcatcgtctggaactactgaccatgcagcagttcgagcgtccccaccgatggagacgaccactccggaaaatgaaccaagcacagcggagaagaagatacgatcctgggccatttcagcaggcggaaattcaatctgcagctgctgcgcagtgtttccactggtgcctccactggcacaggccgccccagggctcaatcgataccaagagacaatgctctcttcggagatatgggcggtgccctccttgtacatatcgatccagaaggggaggtgtttgcgccagccatcgtggggcatatcggtcacgtagttgaatggtgcctttccaatttcgaatgcctccatggacttgccataaagagggccaatgtagtgagactcgccgtagtcattccatgagataatctgcacaaactcaggctgtacaaagagtacttcctgccagcggtcatgccagaggtggtctcctctccacatccagttcttcttatacccaggcaagttggtatagaaccacggagaaacaggcatcatataaggcattccacccaggtattggatgtaggaagcgtcaatataagtgtccatatcttggggaccccatggccatcctgcccagctgaacagaccatcgacgactccagtttcaacggagggtttggcgcccagagaagaccagctcgggataaagaagcagttggtagcagacttgatcgaaggccaatcatcggcacggccaggaccttcaaaggtagacacaaacgcttgacctttgtaaaagaagtatgaggcatgtgcgctatactgattgatcaggttggtgacgtcactcttcggccaattgccgtttccagcataatcgaaggaaaagaagagtttgaagccgacactgtccgctgctgaaaatgcggctgggagggccttgatgtttgttggatcattgtaggccatgttgagtgcaaaggcgtcaatgtgcgcatcctgcgccagtttcatatcgttctcccagtcatcagatgtatagttggccgagttggttacctagtctcctgttaacaaaaagtcaagtttttatttcactgggtagatatcctgcttaccatgaagtgagcaaagacagacgctgcctgcgcctgacaggccagcgtaagcaccgtgatccatatcaggaataaggacatgctggtcattgcaaacttgaaccctgagaaaggaagcgaggtatcccaacggcctgggataactgtccctttttgataactacgctttatatcgtccaaccattttgggcccttgactccgagcagaattgagacatttctttctcgccatctccactaaactagtcgaattgcgtcgggtaagtcggagattgcatggtcgcgacctaatttactagtagtcgagaggcgtcgcttcatgaaattgcctcgcgtgtactagtaatataccgccgtcaaaaatctatgagctacgctagtgctaaaagatcgacccgctaagtggatcatggtcaatgtaacaatatctgcttagcgtgtgcggcgagggaactaattgcttggcgtgtaaggcgataccaaacgaagtataccactagcatctttgcagcgtagcttagccaccaaaagagatgccaagaatgcaaccttggaagaatgcttagaaaggcttcgaggtaaaattgacttggaccattaaaatgtttgaccgcgagaaggctccaacggcctcaagttatgccatctcttcaaagatcatcaaaaagggaactagagagaaaagtagaaagacaagtatcaagccaatcataaagccagtcagcgaaggttgttgtagttcggaggtatgaattgacttatttttttcagagcgctagttatatgagcctgtatttacaacgatgagccaagttaatttcctatcaacttcgtcttgagtatagacacttcggagcaattccgacagtgcgacttttcctgacctgcaccagccccatactacaaccgaacaaaggtctcctagcgttggagccggactctttgcgtggccttcaacttcagccctcggagagggtatactgattcgtagagtcgcagcaaattttccaataggctacagattaatagctcacaatttctcagctattatttgtagggactactcgttccacacccatattccttgctaccacacccctctaacccgaataagctcagcgtttgagtatcttacatgaccgctttcttccgaaattatccaatacacacagtacttctaatcgttgaacacatagtactctgtagtcaactatatggctcctgtataaaacgataccagtaataacagcgaggtgtagtagtatatacatatcccaaattagtcctaaatataaaacagatactgaaaaattattctgcttccaggtatctaaatggtgtatcttacgtaattttatatagcagaatggtcagatcctgtggtaaattttctgccaatagtatgcacgtaagaaaatacagtgccatgtaattgaggtgtctaccccctaatcgggttagaggggtgtggtagcaatgatttgggatgtggaacaagtagacccctatttgtagtgactcaaataaaccaatttgataccctaagtacacaaaaacctgctcctcggtcagtttgagatcacaagcttgtactgccgttgccccacatacgcaacttgcatatggtctcccagttgagaaacatatcctcacaatataggtacttcaatgatggtggccatttccgtgctggcggccatgtctgtgatgacccactccgcgcttggcccggggctaaagaaacaaaccaattgttagcgtgaactttcgagccgagaacaaccgaaagaccaaaagcgtaccggatagctagtctccattgccacgccagtgctagtcacagcgatgctggacgatgggccgggagtagcaactggcagagtcgtattgatggggtcacacccgccgaaagtgaagccagcattatccgagatggtcaaagctgcagtacgatgaagatcacaccgaccggaaagctccatgtagatccatgattggcatttctcgaccctaccgcaccagtcttgacattcagcggtcgtattcatatcaaaggcgaaagtgataggggcgctgttgtaacaagcgattgtgtcatttcggattgaggtccagcattcagatgagacctcagtggccacagccagggtagccaaaacgacgaaagagtagatagggaccatactgccaacgataggttcagaataagagtagcgaatagatattcggtcagttacagacggaattgagaatatatggcagactttgtatttttgcctctttgcgagccctgttatctcttcggcgtgttgccaagttcaaactagcctactacacagtccactggtcctagtctgggttttctcggctggcaggagactttccaggatgagttcttcggccaattattcaccatctccgtgtggattgggtagcttttggttgcatcgacacaaaacttcagatattgaatttccgaagaaatgaaatcctcctgtgccgaacagccggaatgtggataatcgaaagttttggttaggtttatcgcgtaacgaaacacttagattgccttaaatccacactctcaggatgctagaagaatatcaggacgacaacggtggatattttaatttgccagtcaagtatggataagtgcacaatacatactagtaacaagtgccgccacaagcctgtgtactagctcctccatgtctcagagatgttgtcccactaacgctgacgttggggccactttcagcctctagaccactaagtgatcgccaagacctactaagccgccactaacgagccgccaagggtctgtaggctttaagtgatggtccacaaaaccatggctttgtcaaaatatgtagacttattactacacactagcatgtaggaaatttgcaatctccgaggttgggtcctctcaaatataacgcctcaaactgactgcagcgtgcatacccgcccgatccactagatccttgtctaaactgtgttttatggtgggagtccattcggttcccaacttcatgtctcagttgagcattattgcgatggtattttttgcctcgttatttacctactttatctactaaccgaaggtggagggcggattgtaccgaagtccgaaccggcctctggcgatcaagggtatataaaataccgtccgcacaggttgcctgatttatgtgttataatcagtgttgctactagttcccttgtccgggaacgactggtccgaatcatgtattccaattttgctatcatgctttggttgctgcttgtgccttccattatcgccgttccaaccatggatgccttgttcaagcttaaaaagaacgaagctggaagtgacacggacagccttggtggctgtgctaagtatctcgacaaaatacttccaaggtggttagccgaaactagtgacatggttgatgctggcctccaggtattcacggatgccggaagttccaccgatagcccaaccagaacggttgcccgggattttctccagacctatttttacatgaagataacggagacggccaaggtaaaggtggtgaagggtgggtttctcgccgcttatacagccttccagattacgttgctgacctcatttaagacagcatcaaagcagtgaggacatttctcgatggggagccgctccaaaggggcacgccacatttctactgcggtgacacatggctcgaaaaggttccgaggagtgacgtggcttgggattcgaatgggaacgatttgatgcaacttgatgtcgatggggttacgttgcgtcctgctacatttgaggaagtgccagcttacaaagaagacttgttttggactaacccaaacacgaacatgcaagagaccactggccgtgttccttattggtcaccagatttggcttcatttctttttgactctgattacgatgggcgaacttactgcgcaccaggaaacggcggcttgggtgcaacgcaacaaatgacgaagcccgctacgatgaccttctgccctcttgctttcgaatacgacctgaataccgaggttttgggagaaaataagccttcagcaaggatgtcaattacgaaggttatcccgcgaagcgcaactctctaccatgagctcatccacctcgtcgttggtactgacaaaacacaagattacacttgtaagttcttgtcggatatgttaggtcagaccaacgctgataacctgaagacgaatggagtaagatgcaaactgcgctcaagaagcccaatggtacgccgtcgaagaaagaagaggaaaaaactgggcaatattgggatggaatgaaatatcaggatatcatgcgtcaaaatcctgagacatttgtcttcttcagcgtggggtattggtattttctgcagactacatggaacaagaatgcgcggaagcggtggagcttcgatactggtgcagctcggctcgtggcgatataggcaaatgacgaaaatggaaatggacattttctagaagcgaaatcgacaaatttggtacacaatcactgttcaaagtttgacagggccttgaaagctgcctttttgcttctttcttatatacagttgcatagaaagcactttgggatttgggacttcacacttgtcctcgcttgttttcacttgtttgtcgctggtttgtttcgtataattttgtacggcagaatacggagtaagatcgtgagagttgctctattaagggtatgaggaatttagtagtagtcgctaccaatagcaaagagtaaatttcaaatcaaaaacaaagacattcaagcaagagtgattggcttgaaatcacaaaactcttccttccattccaaggctccgacgctttctagcttatcaacaaacttctctagtagggttctcgcgtcccacataagatagccactgttggaatatttcccaacatgcctatactcggcgctctttgcgtccgtccagaagtgcggccatagcatcaactgagcttcttggccatgcacgagctctgttccaatggcccatatctttaatggaaggtcggtttgacgacgcttcacaccatgccgcacaccgccaatccctgcagccggttcacgaataccaatcaaatccgaaatctgagtcttctgggcatcggtcactggtgtcaaaaagtatatccagaacaattccacgtaagagcacgttaacgcatcaaaccagctagggcccacatagtcggagctcctctgcgaaaatgtctctcgagaggacgtagctctgattcctctagcttcgaggttctcccgatagagctgggcggaaggcgaggccatgaatgccctcatatccgaggctctctcccatgcttggtggcagttagcgggacgacctttgattcccggttgatacacaactcacctgtaactaaaagaattgtatccgggcgctcctgcactcttgcatacccggaaccctcgtgccctggggcccgaagcagtggctggaaatgtccagcccattcggtatccagctccagtcccttggaaacttgaaactcggtccagattaggattgcttggtcgttgaggtcgtcaacctgtgatcgatctatagtatcatctcccaagggcgccatgactggagagggttgattcggatctgaacaggatttttggagagaacgactgggggcactggggttttactaagggcactagcgctagcgttgtttcgcctttggccactattcaacgcggtccctttcgtttcaatactggtaatgctatggtaaataaaccacgtgacatttctccttggcgttgtgagaaatcatattagtcaccatacttcgaatattgaagctatttgttagagtggtcacgtgattagcatgtgatcagccacgtgatcccaccgagtcctagccaatgagactataccgccgccaagtgcggttgagaaatctgggtttttacaaggatgcggctagtgatgggcgcattgctacagacgttgtgaatcaaagcacttcattactcccaccgttcatgcacgcgagactaaggccgtgcgttgatcaccagagccggataatcccgcaatcctctcagagttgactccgctttgaaatcgtaaatcaaacccgcctgagacaggaggtcagtaatatcccgaatacacaatttattagcgcccggcagctaagccgaaagggcaactatctttgatctactatacatgtcataatatatatagtacgatgtctcctccgagcccatacatgaannnnnnnnnnnnnnnnnnnnnnnnnnnnnnnnnnnnnnnnnnnnnnnnnnnnnnnnnnnnnnnnnnnnnnnnnnnnnnnnnnnnnnnnnnnnnnnnnnnnnnnnnnnnnnnnnnnnnnnnnnnnnnnnnnnnnnnnnnnnnnnnnnnnnnnnnnnnnnnnnnnnnnnnnnnnnnnnnnnnnnnnnnnnnnnnnnnnnnnnnnnnnnnnnnnnnnnnnnnnnnnnnnnnnnnnnnnatctcagatgtccgtatcgcagcggatcctcgtgggttagtaattttgttagtaggctggcttgaaggcgcttctctaagtgttcaacatcctattttcggcagttgaagtgcgtctactatctgtaacacgaggtggttagtgggttagatcggcgaaagggggtgatttatgttcgtcggcatggttaggtgcctcaagtcggcccgtggcgatggcaaatcgtattgaggcccgtaccgtctctgaccctgtctcactagggcgaacatgccaatctttcggtcggttgggtactggtccgtttcgatatatgagagccacgtctgtattgcttcgtcccccttgaccatctccttggctctgccttcagtttctcggtcggggaactcggtgatattggagaccctccgaataatcctcatgctgagaaattccttgaacgtgacctttgaacctgggtgcagacactcgagcttgcttggatttttggtcagggcgtggcaaccgcgcgcgctggctctccattgactgacggtcgagggcaccttcggtgctggagggcggggtgttggagggggttccatggttacttgaaatctgctttttccgatgagtgtttgtgggagaaagatgagaaatcttgcctttccattaacgaaaccaaaggttgttttgagctgacaaagcagcacaaacctccagggctaggtacctacctacctaggtagagaaacaggtcttattgaggcaccagatgaggtcgtattgatctatacagaaattatcctgcaactttaggaccaatagacgatagtttaatcgaaacttcattgaatgagactgccacaaacattgttctgttgctactatataaatgcgtaggcccgggttgttggatgctattgctattgtcgaagatagacaggttggttttgagtataacgagacgttatagggctgtacttaaagataaggagtactacgtaaaatattaaatgtggatcctaagcaaaagatcttaaggtttcaaacatatatcttcaagttcgtatagccctaaaattggtagtgctacttatagatataaaaagatatatattttgtgatggtggggtaaaaatgcgggtgggtaaaatattttgtggtagggtctgtattaaatagctaattcaagctcatagacgtaacagggccgacaagagagccaataataggattcggctcttcaggctatcggaactggctggctcatatcataacgaatgaagagttcaactggtgccgtttcgtcatccgcaaaactccatagctgagaatattgcaaaagcaagctttctccatgtaatgaagcttgaattattcttccatgattctgtccagtgtatgaaagaaccaataactataaaaaaataagtgagtgcttaggaaatctctagtagctaggaagtgtaagtaagatactaactggatggatcgggtggtcccggaacggccgatcggatgttcgagcaaccatcacggttacaacagnnnnnnnnnnnnnnnnnnnnnnnnnnnnnnnnnnnnnnnnnnnnnnnnnnnnnnnnnnnnnnnnnnnnnnnnnnnnnnnnnnnnnnnnnnnnnnnnnnnnnnnnnnnnnnnnnnnnnnnnnnnnnnnnnnnnnnnnnnnnnnnnnnnnnnnnnnnnnnnnnnnnnnnnnnnnnnnnnnnnnnnnnnnnnnnnnnnnnnnnnnnnnnnnnnnnnnnnnnnnnnnnnnnnnnnnnnnnnnnnnnnnnnnnnnnnnnnnnnnnnnnnnnnnnnnnnnnnnnnnnnnnnnnnnnnnnnnnnnnnnnnnnnnnnnnnnnnnnnnnnnnnnnnnnnnnnnnnnnnnnnnnnnnnnnnnnnnnnnnnnnnnnnnnnnnnnnnnnnnnnnnnnnnnnnnnnnnnnnnnnnnnnnnnnnnnnnnnnnnnnnnnnnnnnnnnnnnnnnnnnnnnnnnnnnnnnnnnnnnnnnnnnnnnnnnnnnnnnnnnnnnnnnnnnnnnnnnnnnnnnnnnnnnnnnnnnnnnnnnnnnnnnnnnnnnnnnnnnnnnnnnnnnnnnnnnnnnnnnnnnnnnnnnnnnnnnnnnnnnnnnnnnnnnnnnnnnnnnnnnnnnnnnnnnnnnnnnnnnnnnnnnnnnnnnnnnnnnnnnnnnnnnnnnnnnnnnnnnnnnnnnnnnnnnnnnnnnnnnnnnnnnnnnnnnnnnnnnnnnnnnnnnnnnnnnnnnnnnnnnnnnnnnnnnnnnnnnnnnnnnnnnnnnnnnnnnnnnnnnnnnnnnnnnnnnnnnnnnnnnnnnnnnnnnnnnnnnnnnnnnnnnnnnnnnnnnnnnnnnnnnnnnnnnnnnnnnnnnnnnnnnnnnnnnnnnnnnnnnnnnnnnnnnnnnnnnnnnnnnnnnnnnnnnnnnnnnnnnnnnnnnnnnnnnnnnnnnnnnnnnnnnnnnnnnnnnnnnnnnnnnnnnnnnnnnnnnnnnnnnnnnnnnnnnnnnnnnnnnnnnnnnnnnnnnnnnnnnnnnnnnnnnnnnnnnnnnnnnnnnnnnnnnnnnnnnnnnnnnnnnnnnnnnnnnnnnnnnnnnnnnnnnnnnnnnnnnnnnnnnnnnnnnnnnnnnnnnnnnnnnnnnnnnnnnnnnnnnnnnnnnnnnnnnnnnnnnnnnnnnnnnnnnnnnnnnnnnnnnnnnnnnnnnnnnnnnnnnnnnnnnnnnnnnnnnnnnnnnnnnnnnnnnnnnnnnnnnnnnnnnnnnnnnnnnnnnnnnnnnnnnnnnnnnnnnnnnnnnnnnnnnnnnnnnnnnnnnnnnnnnnnnnnnnnnnnnnnnnnnnnnnnnnnnnnnnnnnnnnnnnnnnnnnnnnnnnnnnnnnnnnnnnnnnnnnnnnnnnnnnnnnnnnnnnnnnnnnnnnnnnnnnnnnnnnnnnnnnnnnnnnnnnnnnnnnnnnnnnnnnnnnnnnnnnnnnnnnnnnnnnnnnnnnnnnnnnnnnnnnnnnnnnnnnnnnnnnnnnnnnnnnnnnnnnnnnnnnnnnnnnnnnnnnnnnnnnnnnnnnnnnnnnnnnnnnnnnnnnnnnnnnnnnnnnnnnnnnnnnnnnnnnnnnnnnnnnnnnnnnnnnnnnnnnnnnnnnnnnnnnnnnnnnnnnnnnnnnnnnnnnnnnnnnnnnnnnnnnnnnnnnnnnnnnnnnnnnnnnnnnnnnnnnnnnnnnnnnnnnnnnnnnnnnnnnnnnnnnnnnnnnnnnnnnnnnnnnnnnnnnnnnnnnnnnnnnnnnnnnnnnnnnnnnnnnnnnnnnnnnnnnnnnnnnnnnnnnnnnnnnnnnnnnnnnnnnnnnnnnnnnnnnnnnnnnnnnnnnnnnnnnnnnnnnnnnnnnnnnnnnnnnnnnnnnnnnnnnnnnnnnnnnnnnnnnnnnnnnnnnnnnnnnnnnnnnnnnnnnnnnnnnnnnnnnnnnnnnnnnnnnnnnnnnnnnnnnnnnnnnnnnnnnnnnnnnnnnnnnnnnnnnnnnnnnnnnnnnnnnnnnnnnnnnnnnnnnnnnnnnnnnnnnnnnnnnnnnnnnnnnnnnnnnnnnnnnnnnnnnnnnnnnnnnnnnnnnnnnnnnnnnnnnnnnnnnnnnnnnnnnnnnnnnnnnnnnnnnnnnnnnnnnnnnnnnnnnnnnnnnnnnnnnnnnnnnnnnnnnnnnnnnnnnnnnnnnnnnnnnnnnnnnnnnnnnnnnnnnnnnnnnnnnnnnnnnnnnnnnnnnnnnnnnnnnnnnnnnnnnnnnnnnnnnnnnnnnnnnnnnnnnnnnnnnnnnnnnnnnnnnnnnnnnnnnnnnnnnnnnnnnnnnnnnnnnnnnnnnnnnnnnnnnnnnnnnnnnnnnnnnnnnnnnnnnnnnnnnnnnnnnnnnnnnnnnnnnnnnnnnnnnnnnnnnnnnnnnnnnnnnnnnnnnnnnnnnnnnnnnnnnnnnnnnnnnnnnnnnnnnnnnnnnnnnnnnnnnnnnnnnnnnnnnnnnnnnnnnnnnnnnnnnnnnnnnnnnnnnnnnnnnnnnnnnttaaattgtacagagccgtcacctatcatgccaacttgctggctatagactccgaggccttggagatcaccgggggaaagaaaccaagattcgcaactcttaagtagcttgtagagtcgcttaacttcatcgcaacgcctagtctgggtttgtttatccattttcgtgtgagaggggaagagtcaagaaacccgagaacgaaagaaaatcaatagaattgatgatggatggaagtgacgatggagtgtggtcgccaatatgttggatggtcaggtgaccttaggcaggccacggagacgtagacctcattaaaaacattttgagggcgggcactctgaggggccctgtgggggctaatctcttctgggtatagtctgaggtgggctgagtgcatcagtgttgctcactgattggacactgagtatcactcagtcatcctgcacgtgactgatatgagcatgatcactgatctgagcccgtgctgacatctactcagtgagcctgagcctgagcaccctcataaaagcggcggcagctcaaataggaaagccccacccgccagggaatatccggtacgtattggcatgtagagtgatccactgcctgacactaacttagagcctcgtcacggcctttcgtggcccactgccgcttccattgttaggctgccctcatggcgcacgactacgaaaccgctgtgacgcctcggcgaagtccaatacggcctgaaccgtcttcgccctcgagagggtgtctggttcacccttctcaccttcctttgagcctcccagcaggctcaacacgctgttcatcgcgttcccgactttccttctcaattccgtctgcagcatacggagcctcgggcattccgtcagcacgtgcctttggtgctttccttccactcctgactccattgggcataaattttactgcggacggatgcgttctctctcgatagtagcggtcggaagggatgggttttacccggttgcgcggcttccttagcaagtcgatctgctgcatcattcctgacattcccacaatgtcctggcatccactggaggcggagtctgatattctctgcctgaacctcggaagctgcctgtatgattgcaaggccgatctgctgtcacataagattgttgccgttgaccgtactccatctccggcatttgtgcgccggtgggctagcttgaacaccatgtcgaccgcgtagaagatgccaataagctctgctacgtggaccgaccagcgttccatcgggcccacctgcacctgttgagatttcaccacctcttcctggtcgttgagtgcgacgatggcagttccaagatggtcttcacgtccggaagcgtccgagtagacaacaatatcggacatatttctcactgaatctgcccttcctctcgctatttctcgatcgcttccaagctcaatttccgagaatgcgtttgctcgccacggtggtaatggacttgggtcgatcgtttctagctcattcagcctgtcgacgtccatagtcttcagcgcttctgcaagaggaaagcgcgcgtacgatcccacattgtttctacgattctgggcgcgcgataacgcgctccaaatgggatgggcacgaggtggagtgtgtagtctcgctatagtgcgttgcgctcggtggcgaagacggagatgcgtggggggtaggtaggcttccacttcaagcgttgttgtcgctaccgttcggaatgccgataggattcgaatcaatacggttctctgaactgtgttcaagtgtcgcaggtgagtcttgtcccggagcgggtcatgccagaccgttgatgcatagtctataataggcgtaacgcatttgctcttggcgtaagtggcgtagaccacttaaagcgacggtcgtcttggtagcacgtttgatggcctgctgaacgtgttccttccaccgaagttcctgatcaaacaccacccccagcagtttgactgaaggcgatggtttgacgtcggctccatcgaaggtgatcctcccttctaagtgttctcccctctttctggtgaggtggatgagctcggttttctccgccgcaagacacgatcctgtcctctatacgaggaacatcctcggactgtatcttggctaaattttcctcggccgagcgacccactcgctatcggaagtagtcgtcaatgaatgctgacgcgcctccgtgggagtcgacgggctggacgaccagatcggcgttaaagaatgcaaacaagatgggggagagtggtggtccttgcgctaggcctgcattcaccagcagctcggtctcggtgcggaagtcgtcaaatccaatgttggcgtgtcgaccgctcataaagctcgcgatccatttccttgctaccattggaatacctctcgtctgtaacgaggcatccagactcacccggttcaccccattgaaggcgcccttgagatcgaatgcgattaacgtcaccaccttgtgtttgtaccaggctttgtcaatcgcactagacctcctccgagccaaccttcagggctgggatacacccccatatttctcgaggtttcatgtatgtggcagctttccagagctttccttcgccggcctcgtctaggaactgtctccaatgcgaagctttggccttctctatagcccgcgtccacgctcggcgcttttgttacataagttgaaaggctgtaatggtgttgacatgttctcgtccaagctccgcacagcttgcctgccatcttctgcgcagttgattcccttcgacttgttggaccttcaggtctggtgtaaaccaccgtttggagtatggtgttgggcgagtgtcgggcgtgagctggtccacagcctgggctgtagctgatatgagtttctccacaactcggtcgagtcctggccgggtcttaatgcctttccaggggcccgtctgtcgggctacctcctcgccgattctggcccagtccgcgcgatcatacacttttctcgctttgttgtttggcttattctgaggttgaatgttccattccgaatacgtcgcgcggtggtctgacccgtagttttcatggtacagatggcatttgacaagtagttccgggttgtttgtactgtctgatcgatggtcgagctttgtcctggattattcaaggcccagtaagtcgccgttcctcgcgggatacagctgtggaggttgtgggtttggaaaagtcgatcaggtcgcttgcttcttcgataagtcgcggttggatgtagttaccgccccaggttgggtgatggcggttaaagtctcctgcgagaacgatacttgtgggtcgtcgaccatcgcgtagagcagctgtgatcgtgttttggatggcggtgaatgctggttctggcgacgcactatctggcgtgcccagcgggacagatgggatataaacagaaaagaggaggagttgagtgtcggctgtccagatcttgacggcggcgatatctgggtggttgcaaagaatctgccggtgtgaagacgttgagattcgcttgttgacgtagattagactccggaatcgatctgcgccggtctcgggggttggtcggtatagccgccaggcgctgtgattgacatgtgtttggtaggtggtgatcgagggctcttggatcagaagtacatccaagttttgggtttggtggtcattgatgagtgcttccatcctgggtcccgatttcatgatgttcaactgtagtatgtgcaggttcgtttctaacattgatgggggttggacgttgcgggtgtagcacactgtcggtcaccagttgggtgttcaccactacaatccaggcatttggccctgatccctggagggcatcgttgccgctcgtgttgacccgcacaatgtccacaacgtggtgtttccttgcnnnnnnnnnnnnnnnnnnnnnnnnnnnnnnnnnnnnnnnnnnnnnnnnnnnnnnnnnnnnnnnnnnnnnnnnnnnnnnnnnnnnnnnnnnnnnnnnnnnnnnnnnnnnnnnnnnnnnnnnnnnnnnnnnnnnnnnnnnnnnnnnnnnnnnnnnnnnnnnnnnnnnnnnnnnnnnnnnnnnnnnnnnnnnnnnnnnnnnnnnnnnnnnnnnnnnnnnnnnnnnnnnnnnnnnnnnnnnnnnnnnnnnnnnnnnnnnnnnnnnnnnnnnnnnnnnnnnnnnnnnnnnnnnnnnnnnnnnnnnnnnnnnnnnnnnnnnnnnnnnnnnnnnnnnnnnnnnnnnnnnnnnnnnnnnnnnnnnnnnnnnnnnnnnnnnnnnnnnnnnnnnnnnnnnnnnnnnnnnnnnnnnnnnnnnnnnnnnnnnnnnnnnnnnnnnnnnnnnnnnnnnnnnnnnnnnnnnnnnnnnnnnnnnnnnnnnnnnnnnnnnnnnnnnnnnnnnnnnnnnnnnnnnnnnnnnnnnnnnnnnnnnnnnnnnnnnnnnnnnnnnnnnnnnnnnnnnnnnnnnnnnnnnnnnnnnnnnnnnnnnnnnnnnnnnnnnnnnnnnnnnnnnnnnnnnnnnnnnnnnnnnnnnnnnnnnnnnnnnnnnnnnnnnnnnnnnnnnnnnnnnnnnnnnnnnnnnnnnnnnnnnnnnnnnnnnnnnnnnnnnnnnnnnnnnnnnnnnnnnnnnnnnnnnnnnnnnnnnnnnnnnnnnnnnnnnnnnnnnnnnnnnnnnnnnnnnnnnnnnnnnnnnnnnnnnnnnnnnnnnnnnnnnnnnnnnnnnnnnnnnnnnnnnnnnnnnnnnnnnnnnnnnnnnnnnnnnnnnnnnnnnnnnnnnnnnnnnnnnnnnnnnnnnnnnnnnnnnnnnnnnnnnnnnnnnnnnnnnnnnnnnnnnnnnnnnnnnnnnnnnnnnnnnnnnnnnnnnnnnnnnnnnnnnnnnnnnnnnnnnnnnnnnnnnnnnnnnnnnnnnnnnnnnnnnnnnnnnnnnnnnnnnnnnnnnnnnnnnnnnnnnnnnnnnnnnnnnnnnnnnnnnnnnnnnnnnnnnnnnnnnnnnnnnnnnnnnnnnnnnnnnnnnnnnnnnnnnnnnnnnnnnnnnnnnnnnnnnnnnnnnnnnnnnnnnnnnnnnnnnnnnnnnnnnnnnnnnnnnnnnnnnnnnnnnnnnnnnnnnnnnnnnnnnnnnnnnnnnnnnnnnnnnnnnnnnnnnnnnnnnnnnnnnnnnnnnnnnnnnnnnnnnnnnnnnnnnnnnnnnnnnnnnnnnnnnnnnnnnnnnnnnnnnnnnnnnnnnnnnnnnnnnnnnnnnnnnnnnnnnnnnnnnnnnnnnnnnnnnnnnnnnnnnnnnnnnnnnnnnnnnnnnnnnnnnnnnnnnnnnnnnnnnnnnnnnnnnnnnnnnnnnnnnnnnnnnnnnnnnnnnnnnnnnnnnnnnnnnnnnnnnnnnnnnnnnnnnnnnnnnnnnnnnnnnnnnnnnnnnnnnnnnnnnnnnnnnnnnnnnnnnnnnnnnnnnnnnnnnnnnnnnnnnnnnnnnnnnnnnnnnnnnnnnnnnnnnnnnnnnnnnnnnnnnnnnnnnnnnnnnnnnnnnnnnnnnnnnnnnnnnnnnnnnnnnnnnnnnnnnnnnnnnnnnnnnnnnnnnnnnnnnnnnnnnnnnnnnnnnnnnnnnnnnnnnnnnnnnnnnnnnnnnnnnnnnnnnnnnnnnnnnnnnnnnnnnnnnnnnnnnnnnnnnnnnnnnnnnnnnnnnnnnnnnnnnnnnnnnnnnnnnnnnnnnnnnnnnnnnnnnnnnnnnnnnnnnnnnnnnnnnnnnnnnnnnnnnnnnnnnnnnnnnnnnnnnnnnnnnnnnnnnnnnnnnnnnnnnnnnnnnnnnnnnnnnnnnnnnnnnnnnnnnnnnnnnnnnnnnnnnnnnnnnnnnnnnnnnnnnnnnnnnnnnnnnnnnnnnnnnnnnnnnnnnnnnnnnnnnnnnnnnnnnnnnnnnnnnnnnnnnnnnnnnnnnnnnnnnnnnnnnnnnnnnnnnnnnnnnnnnnnnnnnnnnnnnnnnnnnnnnactctcgatctgcactttgactcatgcaaaacgttttggcaacgctctctatcattttggggggtggcaattgtcccggcatgttttctcagctcggctccttgcacctctgatacattcggtgttacgcagtacttgccgaaaacgcatgaatatgttttggatacaataagctatcattcaattgagatgattggaagtattctactcggggcgccatatcacgactcgagccatcttgcacttatcctgtacagctacttgtcacttgattccttaaccacaatgacgttcaacatcataaagtttcgccccccgctgtatcatatccagccaccgtttaacacgtggtttcagcaagaattgtaaaatctactgttctcggcccacattgatggatgaaggaaccaggtccaccgttcattcttttagtctccattacttcatcgctcgaattcgtggccaaccaacatacaagcaactcaagtccgcacatattgccacctgaggtgcaatagtcattggacgattggcgtatcatccacactaaaagatggcttttaaatgtggatggtaatttgctataaaatgttttagaatcttgcctgctacgtagtgggaagttagatacaaactaacattggacaaacttgatcgagaaccgaagaattgtcgacaggtgacacacgtgttgtgctctcctctgctgcgctagtttttgggctgtttcaaattggatgtcgcaggagatacagtagttgtgttcagttccgaggtgctcatcaagctcaaccatctccgcgaaatcttgtggtgggaaacaaatgtagcagatatgatgatatggagagtcgtagatatgttgcagcctcgcgaagaaagttttaaagctgattgcgcagtgcgtgcaataaaattgtttcagaaacatgatccaggattgttaggatgttccccttgagcgttgggagcaagaagaacaagtgattgtttgtttactgaatgaagtcggtgcggagaaaggtggtggggcttttgaccgtgtttgagcttttgtgactcgtaggcccaccctttattccaatcaagctacatatttggtagatccggtcgacacaatgtcaatacgagatgcctctttacgccgagggagttccggaccagattctgcatctggatatggtcgaaaagaatgatcaggaatcaggaatcctgatcattctgatattgccttctgccaggcaaggtgatgcgaaagaatactgtcaatagggtttgcaagaacattacaggtaatttatagagcctcacatcacgtgagagccagtttcaatacgattcggcatttgaaaataggctcagcctgaactagattggcgtgtttcggaatggggtacaagaaagatttcacgagagtaaagtggtgaaactgatttcgatccatgctgtacctggtcatgaagaaacattgttcattattgccgtttttccagaaggagtccagccctttccaaggtattggctggagcagcttatgtcttcaaggaggcactgaattatagagcaatttgtttgtctcgagctaggatctgattcctcataccggcggcaaagtgacggcaaaaatgttaatttgttgactgactcatggcttcgaataaggtcgttcatccagcgatcgatggcattcaaatcccaatggccattggaggatttcaaatatgggtgttgtttggttatggagatgattttacgttcaatttatatgactactcacgtggtatatcgggacagcttctcgagatgctgtgcgattgtgtgaaagttttcgcgagattctgagaaaaatggtaggtccaaagcacaggccatattgtttctgagggcaggtcaagacaatatctccaccagcacaatatgttcgtagcagcctatgttgctctggccgggtgctcttggttttcggtaaaagcctcggagggtcaccagcctcctgcagtttgatgaccgtatttaaacgaacggtcgttagtatgtccaaaggctggtcaaatttagcaatgtgttctggagtattacttagttaccgctcgtcgaggttgatattttctacttgctgttaaccgttgctcctgcgcaaaccgaccggcttattgttgagcattttgtgagatgtaaccgaaagattgtttatttgccaaattgtgagctcgttttttacacatgttgggtcctcatttcatggactttatagttgagacacgatatgttgaagtatgcaagtttgccatgttttttttctatctagtgtctgagatatttgggcattgcagcctacttttcgttatagatatgccaaaagtactatttatgggtcccaccagtgttggtttgatcaaatccagcaactcttgccatggccctcaggaaactaggacataaaaaaatcgggcccgcaaatcggtggttacggtgacacaagaaggatctttggattagccagggaaaactgttcgacaagcctgcctacagagttctattctggcttttctaccagttttatgccatggacggcgccgtcgctctgggtaacccgggagatattcactcctagaatagcaagaatacgcttctggaagaactctcctaccaaagacctatgactgagaggacggcaggtccgtgagaatgggtttttcccatggctctccctccattgacactctcatcgtatttctgctgacagtagcgccgaagactgaagttgtctatggacagagaggaaccattcaataacaagttctctggtccattccatgtttgagcatctgcaaattccattgtcttcaatattcatgtctagtttaacctcttttcatgcctccacgatcctcgaaacttatgctgtacgaatgcctcctctggaatcgatccgtcattcgtactgttagaatgtgactggcccatcccaaacccatcgattggcagtatcaggatatcccccacaagcctcggttccgtcaatccactcaagtcgcttaacgacgtaagatccggctcatcctgctgcaattgtcggaagacggcatctgtccaagcagatggcccagtcaatttcatgacttccgatgaactgacatggagctccgagaatgttgtttttcttgcggttgtgagtttttcagggtggtcatggacgcagaaagtgggcccccggggataaaggaagagagtttgtagttaaaactgatttcgaatatcactgtatacttcctgtcaacgtaagctgacaatctaatatatgtcgtcaattgtatatcagtccttccttccagtttaggtaggattagcacaagccgtcgcactgctaataccctggactagagatgggctcgttagctctgtccttggtcgctatcactagagaatgatgagcagtagacaacaggccgcggtgacaaagtctgccgttacagtaccgtattgcactcagagaacccgatcgccgtgaacacatcaattaaaatctccttctatgaactagctgagcccaagaagcttcgcaaataaaccttgacatgcccatggttgcgttccttggcgatggcatacgccgtctggccatttgaatctttcagtcgttttttcagaccacgctgattggccagcaactgtacaacctcataatgcccaccagccgcaccccaccagaatgatgttctcccttgctcgtccaccgtattcacatttatgttgggatgctccaataatattttggcaatctcaaatctaccttgagctgacgcaaacatgagcgcagtaaaggagcaagggccttggtcattgatcaacaaagattcctcgtagctgagaaggagaaggacaatgtcgacgtgctccatgattacagcgacctgaagtggcgacgtccccgatggtcttttttggttaatgttggctgaattttgcaagagaaattccaccattgaaaattgtcctgcgcgacatgctaaccagagcggcggaaatgcattggcagattgagggtttttatgaagccgcggctgttggaagaggactttggccaattctaaggagccatttgcagcagccattgccaaaggtgtctggcccagcttgtcggcgcaattgaggtccaggtttgtttgccgtaagaggagctcagccagttttatgtcggaattgttcactgcataccagattgcagtgcggccattctcatcttgataattaaggttgatacatggacttgaaagcaaggcttcaaggataagtagtcttttgttgatggggagaaaacaaccgtgtcctttaacagccagaagcaacggagtttcctgtcggtggttgagacagttgacatcaactcgcggatttcgtacaagcatttgtattactccatagtcgcctatttctgttgctaggtgcagtggtgttcggccatcatggtcgcagatgttgacatttgtccgctcatcagacaagaaaagttggaacatataggtttggcgacaggtcagcgcaattgaaatgggcgcgtctccgtccagggattgattattgagatcaatattctgtacattgaggagtcgttggacaatgttgacgcttccatgcagaacagcgatcgagaaggcactttctcccaaggtattacgctgtatgacttttactgaatgatggctcaagagcaaatcaacagcgtctgcgtactgcagctttgtagccaacatgagaggtgtaaggccagaaaatgtttggttgatatctgccttttcccaacccagaaagtgctggatgatgcctaactttctatgttcgattgcccaatgaagtggcggggtgtcttggaagtctatgcaatcaaagaggctctttctgaagatgacgagggatcctcgagatgcgagacacagacttcgaatgtccttcacctccatgaatttcacaatccacaaaagtgattctagtggaagtcccaaaagcagcatcttggcggatttcgtgaacgtatagttaacgaatacctatagagataataatgaaaggagggctcagagtaataattcagagataagtttgtcaccgccagcagttggctgaggagcttgggagacgcattcctttgaggcagtggcttcttaaatattttttgagggcgtatcatttatacggatttattcaagtggagtcaagtcaccggcttctaggatcgcgatacttactcctgggatcctgcgactggtttcctaggagccctaacgatcccgggatatgttacaatgctcccaggaagcactcacccattcctgggagttacgcatcgtatgggatatacatgaagcatacaagctaaattgagatatgatctgcgggtcccacatggtgcatatgggatcccctccagcgaaagcttccacgcgctacgtcgtgtatctagagtggactatagactttcttgatgttgattattcattcggaagacgctgtcctcagaaacacccggaatattgtggcttgacatcaaagttgacgatcttataccggtgaggccgacgtttacaccgcgggaacgtcagcaatgcataagccctcaaaaaatattttaaatagagaccattggccttgaaaattagtatctgacaattatcttatttcttctacgagtgataaatcgtctgaaaacccaaaaccgctcatgcctccacagagaagacatgtggcgtcgggccgcccgaacccataccccttaccaatcgtttatcaaggtcagtctgggattgaagtaccatgacggttccgaattaacctaactcaggcacgcaacatgcaaatcaaaggctcgagggaatcattacgagcatatacgcagaaatgtcaaaaatacaacagaaacactacgaggcaactgttatgctacaaaactgcgacaatatgttacgggcccacgcaatggacaaggccgacttggagaggcagaaccagtgttttattgaacatatcaagatagctcaacaaaaagcttgcaacctagagttcaagaataaggaactcgaataccaactggcaaaagtgagacagctgcaccccaaacaaccagaagggaggcagagttaaaaatttactgttgaagttacaaactttgcccagttaccaattgaatgacgccataattgatggccaaatgaacaggagctataatgcccatttctgtggattaggacatgcgaaggatcattttgttgcggcgaccgttctgaaacgagattatgtgaaaggtaggcagtgccttactttgccttagcccgcacgaaacagactaggaacagatggaggcaatgtattacctaaatcagggtcgtttcagagttttgtatcaacacaatgttgcaatttcagtgtgcgacaataaaaagcatgagattgccgaccaatgaatccctttgactctgtctccctagaattcgtgcaagaacaaaggggagttcaactgaccctatgcccggattgccagctacggtgcttgctagattagttctgtgttgtaggttccaacgccatgacaagaaaatggtttaagagttcaataagtctgttttatgctctttacttatcgctagtcattcctagacggcattgtccctcccaggaacctccgagtctcccgggagcctgatacaagctcctagaaaccgaataaatgctcccaggaacggcacgggtagtcccaggagtccctgagctcccgggaacttagaaagaggctcccgggagattcggtggttcctgggagcgcatgtcgctcacctgggagtgcataacgccatcctgggatgagcaagtttctacgtactcgggtcgaactcgtagatcgctcttaccgctttttcatttttgtccacaggctaaccatagaaattgcaatcccattctagacatgtgaccgaggatataggttggtttcgacagtgctatgaggttcgatttgggcagcattttctttagaaggctatcttatgctgacataccatccttaagaagttgggaggaatcgcagattacgtgagatagctagagattaaatacttagcagatcactcaggagctgtaatataatacaaaataaaacatacatggtacgttacattacactcagtaattacttactaatttttcttgtcgtatgtggcggtgcagattatgtaactgtaatgtaactgtctgtttccatgtaataagctggctgtattgggttttcaccagaacagccaacaagttgcttgcattgctagtcttcacggtctgtgtcctgttgcccactgcagttattttccggataggttcaatcaaatacgactagaaataaggactcgactatcatttaaagggctatccgcgggcccacctaaaaaggaagctcatcatgcttcaaacttgtgcgctgaaagtgtagggtgtttgcccctcgagttttaacgtacatcgcgtttactctttagaaaaagtgtccgccattctgcagaaatttgagccatttaatttctaactgatcccttatttttgcacagctaggaactttccgatggtgtgacaaggagtctagttaggtcggcgagggttggactgcgcggctgaatagcaaattttgtacagactgatgataaccaagcacaagtgaaatattattgattgaaaaaatgactcagttgctctttcaattggcccgagatctggtgcgtctctgagaaggcttcaattccatccatgcctgtcgcagtaacgccatatcaatatccgcgaaatgaggcccgatctgtctcagggtcagattctgtctctgtaggtcacgcaactttcgtttgttctttgcattaagcctctgtcgaggcttgcagctgttcnnnnnnnnnnnnnnnnnnnnnnnnnnnnnnnnnnnnnnnnnnnnnnnnnnnnnnnnnnnnnnnnnnnnnnnnnnnnnnnnnnnnnnnnnnnnnnnnnnnnnnnnnnnnnnnnnnnnnnnnnnnnnnnnnnnnnnnnnnnnnnnnnnnnnnnnnnnnnnnnnnnnnnnnnnnnnnnnnnnnnnnnnnnnnnnnnnnnnnnnnnnnnnnnnnnnnnnnnnnnnnnnnnnnnnnnnnnnnnnnnnnnnnnnnnnnnnnnnnnnnnnnnnnnnnnnnnnnnnnnnnnnnnnnnnnnnnnnnnnnnnnnnnnnnnnnnnnnnnnnnnnnnnnnnnnnnnnnnnnnnnnnnnnnnnnnnnnnnnnnnnnnnnnnnnnnnnnnnnnnnnnnnnnnnnnnnnnnnnnnnnnnnnnnnnnnnnnnnnnnnnnnnnnnnnnnnnnnnnnnnnnnnnnnnnnnnnnnnnnnnnnnnnnnnnnnnnnnnnnnnnnnnnnnnnnnnnnnnnnnnnnnnnnnnnnnnnnnnnnnnnnnnnnnnnnnnnnnnnnnnnnnnnnnnnnnnnnnnnnnnnnnnnnnnnnnnnnnnnnnnnnnnnnnnnnnnnnnnnnnnnnnnnnnnnnnnnnnnnnnnnnnnnnnnnnnnnnnnnnnnnnnnnnnnnnnnnnnnnnnnnnnnnnnnnnnnnnnnnnnnnnnnnnnnnnnnnnnnnnnnnnnnnnnnnnnnnnnnnnnnnnnnnnnnnnnnnnnnnnnnnnnnnnnnnnnnnnnnnnnnnnnnnnnnnnnnnnnnnnnnnnnnnnnnnnnnnnnnnnnnnnnnnnnnnnnnnnnnnnnnnnnnnnnnnnnnnnnnnnnnnnnnnnnnnnnnnnnnnnnnnnnnnnnnnnnnnnnnnnnnnnnnnnnnnnnnnnnnnnnnnnnnnnnnnnnnnnnnnnnnnnnnnnnnnnnnnnnnnnnnnnnnnnnnnnnnnnnnnnnnnnnnnnnnnnnnnnnnnnnnnnnnnnnnnnnnnnnnnnnnnnnnnnnnnnnnnnnnnnnnnnnnnnnnnnnnnnnnnnnnnnnnnnnnnnnnnnnnnnnnnnnnnnnnnnnnnnnnnnnnnnnnnnnnnnnnnnnnnnnnnnnnnnnnnnnnnnnnnnnnnnnnnnnnnnnnnnnnnnnnnnnnnnnnnnnnnnnnnnnnnnnnnnnnnnnnnnnnnnnnnnnnnnnnnnnnnnnnnnnnnnnnnnnnnnnnnnnnnnnnnnnnnnnnnnnnnnnnnnnnnnnnnnnnnnnnnnnnnnnnnnnnnnnnnnnnnnnnnnnnnnnnnnnnnnnnnnnnnnnnnnnnnnnnnnnnnnnnnnnnnnnnnnnnnnnnnnnnnnnnnnnnnnnnnnnnnnnnnnnnnnnnnnnnnnnnnnnnnnnnnnnnnnnnnnnnnnnnnnnnnnnnnnnnnnnnnnnnnnnnnnnnnnnnnnnnnnnnnnnnnnnnnnnnnnnnnnnnnnnnnnnnnnnnnnnnnnnnnnnnnnnnnnnnnnnnnnnnnnnnnnnnnnnnnnnnnnnnnnnnnnnnnnnnnnnnnnnnnnnnnnnnnnnnnnnnnnnnnnnnnnnnnnnnnnnnnnnnnnnnnnnnnnnnnnnnnnnnnnnnnnnnnnnnnnnnnnnnnnnnnnnnnnnnnnnnnnnnnnnnnnnnnnnnnnnnnnnnnnnnnnnnnnnnnnnnnnnnnnnnnnnnnnnnnnnnnnnnnnnnnnnnnnnnnnnnnnnnnnnnnnnnnnnnnnnnnnnnnnnnnnnnnnnnnnnnnnnnnnnnnnnnnnnnnnnnnnnnnnnnnnnnnnnnnnnnnnnnnnnnnnnnnnnnnnnnnnnnnnnnnnnnnnnnnnnnnnnnnnnnnnnnnnnnnnnnnnnnnnnnnnnnnnnnnnnnnnnnnnnnnnnnnnnnnnnnnnnnnnnnnnnnnnnnnnnnnnnnnnnnnnnnnnnnnnnnnnnnnnnnnnnnnnnnnnnnnnnnnnnnnnnnnnnnnnnnnnnnnnnnnnnnnnnnnnnnnnnnnnnnnnnnnnnnnnnnnnnnnnnnnnnnnnnnnnnnnnnnnnnnnnnnnnnnnnnnnnnnnnnnnnnnnnnnnnnnnnnnnnnnnnnnnnnnnnnnnnnnnnnnnnnnnnnnnnnnnnnnnnnnnnnnnnnnnnnnnnnnnnnnnnnnnnnnnnnnnnnnnnnnnnnnnnnnnnnnnnnnnnnnnnnnnnnnnnnnnnnnnnnnnnnnnnnnnnnnnnnnnnnnnnnnnnnnnnnnnnnnnnnnnnnnnnnnnnnnnnnnnnnnnnnnnnnnnnnnnnnnnnnnnnnnnnnnnnnnnnnnnnnnnnnnnnnnnnnnnnnnnnnnnnnnnnnnnnnnnnnnnnnnnnnnnnnnnnnnnnnnnnnnnnnnnnnnnnnnnnnnnnnnnnnnnnnnnnnnnnnnnnnnnnnnnnnnnnnnnnnnnnnnnnnnnnnnnnnnnnnnnnnnnnnnnnnnnnnnnnnnnnnnnnnnnnnnnnnnnnnnnnnnnnnnnnnnnnnnnnnnnnnnnnnnnnnnnnnnnnnnnnnnnnnnnnnnnnnnnnnnnnnnnnnnnnnnnnnnnnnnnnnnnnnnnnnnnnnnnnnnnnnnnnnnnnnnnnnnnnnnnnnnnnnnnnnnnnnnnnnnnnnnnnnnnnnnnnnnnnnnnnnnnnnnnnnnnnnnnnnnnnnnnnnnnnnnnnnnnnnnnnnnnnnnnnnnnnnnnnnnnnnnnnnnnnnnnnnnnnnnnnnnnnnnnnnnnntgttagtttatgatggtctcagggaggaagttacgaataaaccaaccatttttatttcctttcgatcgtctgggatgattttaatttttgtgaattgttcgaatccaccaaagaactgttcggcatgcgcactcacggttcttaccgtaggtagcccatcatcgttcagtcgcccttgagtagaatttgcgtaccagcgaatgtacgccttgatcatctcatgagttggagccggagaaccaagggaggtttggtaatattcaaacccattctccgggtctgtagtgaaactaaaggaaggtcagcagaatttataataggaaagggattgccacctcagatgcggcttaactcactcgagccagaggttcatagtttcttgatgtaatttgttggtcttggggagtcttctgtctttctcccgaattgagtcctcctctctatgggccccagggacataaccattcttttctcgttgtagacggcgcctctccatggcgattccatcgcgcttggcaaaaaagtcttttctgcccataatcaagtgcggtgcgacctggaggtaggggatgtatgcaaagtaaaagaatgcgatattagattaatgtaccaaagaaaaggcgctaggcgtgttggttattacatgctaatgctggcacacggtctgcctttataattgggactttgagctcgagccgctctgaattagaagacaaaaggaagacatcatgaaacggatgaagttctccgctctttcctgcgccccttcgtcataatgtattttcttgatgaggtgcagtgcttcggaaaatgagggcagtagcaatgctatcaacgaactaactatcacagtataaacgaccctgtgggggctaatctcttccgggtatagtctgaggtgggctgagtgcatcagtgttgctcactgattggacactgagcatcactgagtaatcagagagcatccaatgagcactcactgagcactcactgagcatcagtcatcctgcacgtgactgatatgagcatgatcactgatctgagcccgtgctgacatctactcagtgagcctgagcctgagcaccctcataaaagcggcggcagctcaaataggaaagccccacccgccagggaatatcctgtacgtatagtggcctatgtaacggattttccctggagggtggtgatttcctatttgggatgtcgccgctttagtaagggcgcaccactcagactcaggctctcggagtagatatcagcacgagctcagaagggatgaactcagtacagtcacgtgaatgatgactgatactatgtaaatgcccattggatgctcactgatcacttaccctctgtgtccaatcagggagcaattctgctcaccatatgagtggaacagccccatatttcccttttcttattgcagtggggttccagagtaagatgactaaaccgccatgtgattaagggcactcccgaggcggagatagcaacgcagacacctctccacctttccattctcagtagccatcccatggtgtttcctctctagcaccctactcccagtaacgactctgatctcacacctgtgtcgcaggcagggctgtctgtgcccctgtccctgtagcagggtcccctcttcaatatgaaggtgaatatattgttagaatgccttgcaaaccaatcaaacaggggaataagatatttgcacagcaaagcatgactatatctgggcatttacatggccatagtagccgtatttggggtatcgcagagatttttcactgccctgatatcagccctactggtgcaatggtgcttagtatgatcaaaaagcttgctacgatttctcagtaaaacccttggttgcaaagtggatgtaaaagccggtggaaaagaagttgaagacgcagggtattgctgagtagcaggtagtcgcaaatcaatcctaggaagcttttcaatcatactcagcactattgcaccagtagggctgatatcagattagcgaaaaagctctgcgatacttaagacggctactccatgtaaacgcccagatagtataaccatgctctgctagtgcaaatatcttataacccctgtttgattggtttacaaagcatttaacgatattaacctctattcctgtatattgacttggtactgtggtactatttccttcaaacatggcccattgagccagccgtatcctcctatttcaggcttgccaatcagccttttggatactgtggtcactgaagccaccgagaagagaaaagatttgtaagaatatctcatatctttatctaattgtgactaagctgctactacgaactctaatggcggtagtcatttacttgtaaaggcagaaggcagcgagtaaaacctgctttgtgatgattaagtccttcctagtagccctcgtaggcccctcgctagagctaagatacaaactcagtcgcttcagtattctaatcatgtgtcacccttgggtaaacgatccccggcgccttcttcatcttttctttagcaggtaatcgagcactcggaatgcgccgctatggatactttgcatgtccttctttctttctttaactctagactgatggaggcagataaaattgacatatgagctgcaccgaataagatttgcatcaataggaatgtataacattaaaaatagctctgaaatcattttcaatgcgcggctgctttcaaaatgatgacaagttgatactcgtgaatggcttcatgctgcagaacaaccctcgatccacaacagcacagatttcatcttctctttctcccaaggacgaaaagcaagccaactgttccattctcatcattaaaccccccggggtacttcggtccttcaagaatctcctgtggcattttcccgatctggtcgcaaatcagggtcaaggaaaaagctagtccatcacttttgctgacatactcaacgcccggttcaagagcattatgtgcaagatggacttgcagtatgacgtggcgagctcttgttggaaaccgtgattgctgatggcactaatttctgacagatgatgatggtagaggtccaataacagatccttggcattaagcaccgcatttgtttgctccttgtatccggatttgccagacattaggaggaggagtgttttctcggggagctggtcacgggcagaatagtattgagataagctgcgcttcatatcatcaaaatcgcgcttcctcgggttcccgactctctcatatatacttttttttactttcaaagacccgaagactttccccatttgctttcatcttgctctctattgacgctttattccatgggacgagtatgtcccatgggaagcaaatgtcgtccaactagttagaatacagacgaggaagccggtgctagagtaataagagactgtaagtaatacgtataagaaaatatgtcattgaacttgggtttaattgatgggttgattgagattcttatacctgttgcaaccttatcaagtgcgtgatatactactccgttgtccttttttgatgaataataggtgaggtttagagggatagagtgcacgtgctgaagctcacgtgtcgcattttattgatgtagcttactcagtcagatgatgcttaatcagcttatgtaatgatctccgatcggatcagaactgttcagaggcgtgctcaattttacctgagatcaaagagcggcaagaggtgagcactaaaatggaaagggaaaggcattatccggtacatatattgcacaacatatgtacatatcgatgggctacctgacccttacaggttatgcaaatgtactcatatcatatgatatgattatgaaccatgtacggagtactttgggccttgaagatctgcctaatgaaagtccgggtgctttgaagtatagacataatttttagtgctggacattttagatggctgagatttgtctgcagctgccaaatatagttaccgaaggctttggtttagctactgtcctgtttctcatatatattgaattattttggactatacaatgaacttggaattcgttaaattctggttctgatttgacaaaataaatactggggatgtctagaggaagtattgttgtaatggcctgcaaaaccgtgagagatatatattccgtcgggaaagggatgttgacatcaaaagcgcgtaaaacgtagaaatgaggtgtgatcatgaaaccaccagctccaaaaagaaattcaacgcatataaaaaacaaacaattcagaaaacctaccaaaatgaatcaacaagctagcagagttaccccggcctcatagtatactctctaacattgaagcatcacgggatgatatgattagataagaacctcttatagtctaaacccctttaggactagtccgtcaaggctctacagaacattttttttcctgtccggatcaactgcgaaaccaccagcctaaacccccatttgtttcctaaggggcggaagaaaatagagtctcatcggaatccttgctgtttttatttgggcctggtctattgatatctatcttcacaccaccgcaccctcgactgcgagaaaaaaaaagaagataagaaaaaaagttacagccaagatgggaaagaagacgactcgcccatccaccaaggtcgcctcggccgccacatcgccggcatcgggcatgacatatgcgggcagcaagtcgtcgatcctgcgcgctgcgttctcaccatcagagtaccaattggccctgtttgcgtccgttatccaaggcctcgatggccagcacattcgcattcacgacacacagacaggacgcctccagtgtgagcatgccctggggccgaaggaaacagtgacctctttggactggggatactacggtggctcaggcaagggtcgtgaccagtcgaaaaagaagcgcaagcgcggttccgatatcaatggggctgttgatggcctggaccagggggacattgtggttgcattcggcacaaatacatcggatatccgtatgtactcgccatccgaagataaggttgttggcaccttgaccggcgcgcatgacaagggtatcaaggacttcaagttcacggccgatcgacccgcccaggaggcttggagtatcggtggtgacaataagcttgttcagtgggacctgcgcaccggacaaagcacacagtaagtttgggatacttgctgggtaacaccgagctcctaactaatatacccgtaggacaatccacctccccgcatcctcagtcttcactgctctctcccgccctgtgccctcgaaccctcctcttatctgcgcttcccagaccccgtacttaatagataccgagaaggccgatgagccggttcagttcccggccatgcgcaaccctatccacaccgtcatttcgtcctcttccgagtctgctggtgtcggtgcattccttgcatctgatggtgaccgcttcatcaacgtctttgatgtcgcttcccagaagcttgttcgtaaccttgtcgccgaccaggaggtctcgtcgattacactgcaaacagatggcgctaccaccccggagaagcaagtgcttgctgcagttaccgcagatggcagcatcgaactcttcacaaagccatttgttcagccccaaagtgcgccctccgcgagtgccaaggctagccggaaacagatgacccaaaaagcaaacgcaaccctcaaaatcaccaacaccgagtcttcgaacgcctgcgttcctgtcgcagccatatcattccagggccctaacctcgtggttgcatacaccgagggtggtgtgatccctgtctttgagcgtgtcaagttcctcgacgaaaagaccgatgagctctctttcaccggaaccaagaccgtggtgaagaccaagtcaggctcagcactttcgtctgtcacaacgaatggagtcaagagtgcaggcgagacccgggttgacgaatctcgcatgaatgtcgagcagggtaacctggtcgatgatgatgtagagatggaggattcacgacaagacgcatccgactctggcagcgaggaggactccgatgacgacgacaacaagaagtccaaggcttcgaccgagaaaaagaccaagcccaccaagcaagtcgcagcgaacgaggacgtcgagatgcagaacgcatccgactccgaagaggaagaggaagaagagggcgcggagccatcgttcggcgaacttctacgcgcaaacgcaggccaggaagtcgacgtcgaggccgagcttgacgacgacgtcctcctgggcgcattggttcccggcaagccccaggccgtagtgcaacagatccctaccggcgtttcgctcgcaactgtcctcacacagtcgctcaagaccaacgacaacggaatgctcgagtcttgtttccacaccggtgacacctccatcatccgcactaccatccagcgcctcgactcttcgctggctgcgaccctgcttcaaacactcgctgagcgcctcgcctcccggcctggtcgctacggccaccttctcgtctgggtgcagtggacctgcgtcgctcatggcggcgccctggctggtcatcctgatctcttgaagcgcatgacttccctctacaaggtcatggaccagcgctctgctaccctgccctcccttctgctcctcaagggcaagcttgacatgctcgatgcgcaattgggactgcggcaatcgatccgcggtggcgatgaaggcatggatagcgaggacgaggacaatgtcatctacgtcgagggccaagatgacctcgaggacagtgagactgaggccaagacaccgcggaagtcaatacgcgaccaggcttacgatgaagacgagtcaatgatgaacggcgtcgacgagtccgaagatgacgaggacgatggaagcgacgatgaggatgacgacgaagagcctatcttggacattgaggctgctgagtctgtcggttcttccgacgccgaggaatcgctggaggagaacgaggacgaggacgaagatgaggatagtgatggctcgatggttgacttcattgccgacacggaagacgacgagtccgacgatgctgctcagcagcagcccccgccatcaaagaagagcaagtcttctgcttccatcggcaagaagagcaagggcggcaggaaataagcgtgtctcttttgaagttgtacgaattagagatgggagaatggggtaacggcctataaaagaacatattttttattttttcccttcgatgcatccaaccgggtctgcatgtcattttttctttctttgttttatcttttgctttcgatatcttgtgcctctaccgagcgcctctgcgtctccatcaatgtctattgaatttcaccttggtatcttgaatatcgcttcttgtaaggaggtatacgataacccgtacagagcacttttctacacataaacacggtatttataccagcaactcctcaccccggcagggacctgcatgcaggacccgatgtctcggcactccttcctcaccgaggggaatcagcatggctgtcgtccgctcccgcgagggataggtagtgaagtgacccaacgcactgacattagcagtgtcgagagctagaatgactccattcttgccaccttcaatccaggcctcggtggtcgaattggggagcgtgatgtgcgctagaccggagaggtagaccacccatctagtgcggcattagctgattgcggactctataaaaacaaacaaacaaataataaaaaacatgtacaaatagcacatgtaactcattcagagtcattaatttgaaatagcgaaacaaacgcatgagggagaatatcactcactgcaacgcaggcgcattatgtctaccaccatcaaacccagccggcaacaccgcaaacgatgcgttgccaccgacttgccccaaattcaaggcggcggtgccaacctgcccgggttgagcggaagtttgaaatcccggcacgagagcccagcactctaaggtggagcgatggtggcgtgcgccgagaacggtcacgttgagagattgggcgaggattgccgagggaaagatgaattggatgagggtttgaagacgcattttgaggaaattaggagtgaattgtgtgagctagatgtaattgggaggaaaggaaatataaataagaagaagaagatctgggagctgatatatagttatggggggagccaaaagttagttttgtcgtagtggtccgatccttcgcccatgggagccgaagagaactgaacggcggtggagtggaatcagcgctcgcctatgagcggattggttcctaaaataagctagcactaatacagagagggcaatatattggaggaatcgtgtgtatgacatcgatgagagtacatagctactgtaggacagtgacgtcggatcgaaattaatgttaaacatactacggagtatacttagcagattggacggcagaaaacaagaaacaattcaattcatcgcaacaaagaatgataaacctacccaagttctgtcttgcagcattaaaccataaaaatataagcgcttaatgatagtgagagtaccccgtactcagacccaagaagacaaagaatactaacgaatgacttcaccaccagacttctcaatgccctcgaggccttcaagaatgtcgcttccaccgaagagtccacaagcagagtcagtgcttgttcttcttccggtccagatctcatggaatttcacggtttgatcactagacgcgacaataatgcatccctcctcccttgttcgtgtgcaccacatcccaccttctttttccttgggagtgaccatgctagcaccaaccctgcggctactgaccttgcggccacgggtcggggtctcttgttctggagacccagtctgggttgacgaggacgaaggtgaagatgactggctgtcaggccgagcagagcgtgtagccgagaaacgagggatttttcctggatatcgtactgcccacagtgctctcccgcagtcgaagttgctaactcgagtctcagggccatcccaggtggttccatagggcccccagggaatgacggccacctgtgcgcagctgggccaggcaaagacggcgattcgaaatgggtgatctggctgtgcataaccaaaagtagcggcgatctcgcgtcgagtctcgctccatataagactggttacctgcgcgaagacattgatggttgcgagacaagctccgctccgggtgtgatagaagtgtatagctttgtcattggtgcctccccccgtcgcgagcagggatgactgccatggcgcaaatgcaattgccttgaccgcagcggagtgcatcagacgatacttgtgacgaccgtatgggactagaatagttcgtcccccaccggagatcacagtgcctgcatggtttaaaagcgcagattcggccggaggcttgactggagcagcaagccatgatgggagagcaggtcgtctaagaaacaatcttcttcttgcggtgctcagaggaaagtatggaaatacaccgaggctgaagctgctaggagaatccgggggcgtgatgggtgggaccatataactcatctgctgtggcgaaacaatctcagccagctcaaagagaaggcaggcgttgtcattaccacccgtggcaaggtatttgtcatcgggtgaccatgccagtccacagatttgttgagtgtgtgcacagatcttggcaagaagcgtcatggacccgttccaattccacttagcttgatcttcttcgtcagaccactcgactgaatagtaccagatatttccaaagtcgtcacctgcaacaatctcttccacgtcgacttccatatgcatgaaccgttctgaaggtcgccgtgatgttctcggcttaaacgtcacacatgtaatggtactgggatgactgatctcaaaccggacttccttctcgaatgtgctccatagagacaactgacctgaccgcctggccactgcaagaatgcttcgctcgccatcctcagaagaaaatgacaaggaggtgacataatttgaggggtgcagatctggaaaggggggataatccatcccatgaccttcagaccagagatatacttgatgacccagacccacagcaagtatcccggatgttgttgagtatgcaagagtgctgcagtaaaaatcgtcccgaaggaaaggagcatcaaggattcgaaaaggcttcggtggaacaacctcttttctggtaggagataagggccctgagaatcgatccgagtcagttgatgccttggagaaggctgcggataccgccagtctcacaattccaaaagttgggttaagaatatcatatatgttttatctgtaaatggtaaatgtattccaaaagtaggctcagggggtggctgttgatgactacaattgcacttacaacgctccttttcaatttgcttccaagcactgtccttccattcaaatggggagaggcgctcgaagtctggagatgctggattgaggggggcatccagataccgcagacaagtagtacctagctgtctggtcgtcgggtcgattcccaaagcaagggcaagcctcgactcatgtatttcttgttcactgtacttgggttttctgggtaaaaaccgagccacgaagattggagcagatgatccattggtcgaagtgctcggcgtttcatgaggagccacgacaagggaactatcgaggactgcagaggctccccccacgttccagactgcgccggagctgacctgtctcaaagattcatgcgcagcgttgttgcctgtgatattgccttcagtgactagacgaggccgttgatgtgggatctgctggagtcgagttggcagctggagtctgttggcaacataagccctacgtgggattgtgggtagaaatggatcatcaccgggaggaagtcgtcgaaatagtctctcttgaggcgaaagacgctgcggatgcttggccacacgaaaggttgttgatgttggttccacgaagtctcgctttggaatgaatctatcaggcgacataggacttcgaaaggaacttcttgctactgcatttccagtggttctcactctgctgcgacctcttttgggtgaggagacccggttttctttggaacgagggacgggtgtcagagcatgttgggtcttgggctttgacaatgatgattgagaagtaggtgtttcaaagaatggcaaattgatagttgcaaattcagttaattggacaggtccactgtctctggaagactcggatcgagagtgcgaagtcaatggatgtttgtgactgcctgtagaggtttcctcgaaggagtgacgttgcatatctaccatggttctggatgcaggtcgataagttgtatatgattaatgacctagagctaaaaaaggaatgtataaggaggcctctctttcaaggcatagcggcaagatgagaaagacgacgaagcaaaagacaagtccccaaagtagaaagagtgatgatcacgtgaagctatgcagatgccggggagcttacgtaatttacccaccgcatcatccatggatgcaccaatgagataattctagttggccacatctgatcaacacaaagcaacctacctacaaggaaacaccttctatttatttcttattgtcaaacaaagagtgaaaatgcccagtgtgagataattcccgcatgctgtaccgttccgaggctgacgattgcgatagcatggtgtgccgcggtacaaaccagctgagaagtccgccgaggcgcgacagcaagagctgcagaagatagaaaaatacaaggatctcgagatttctgtatccaaaaaggttggccaccttttagagctcacctataaatggagtctgacctaggacaggtggctgagcatgagtacacaatcgagaccttgaacaagatctcggagctgctgtctagcaatccagaatactacacagcctggaactaccgccgtctggtactacagtatcagttctcccaagcagggggctcggataatgagactgctacccattcaatcacacagctaattataaatgatttacatttcctgattccccttctccggagcttccccaagtgctactggatctggaattatcgtttgtggctgttggatgaagctcgccgtctactaccccttcccgaggcccgggaaatctggcagcaagaacttgcccttgtgggtaagatgttgactctcgatagccggaatttccacgggtggggttatcgacgcttcgtggttgagactttgaaggagcttggcactgccgaggaagcaacaagcatgacccagaaggaatttgaatatgccacgaagatgattggagccaatctttccaacttctccgcgtggcattaccggacaaagcttatccaatcccttttggatgagcaatctgccagcgatgacgatcggagaagaatgttggacgatggttggtctaacctgtcttatcagagactatcttatactgatttttgtttttagaactatctctcattcatcaagcattcattgatccttatgatcagtcactttggttttatcaccaaaatctgatgagtgtgtttgacccgtcgatggctgaacgaactatggcccccaatttgagctcgtccgaccggctggagtacattagaaatgagatcgaagagatccaggagatgttggatggggctgaagactgcaaatatatctaccaggcattaattgagtgcacccttctcgcatccaaggtcgaaggcagcttgtcttctgaggatcgggaccagattttgagctggctctcagaagtgaagaaactggatccattgcgacgagaaagatggcttgattttgagaagaccttgtgaaaatatatgaataggtaacctaagcctgcggccctgtcgtgtctttttatttgtctttttttccggtattgtagtaccagcgtgttgctatctgcatgattttctggtctatgactctacggatcggcgactatctgctgtctgcattgtttaattcatagttgttttacttcatagattatgccacttgatggattgtttgctaaatagctaagcgagatgtttcgaggcttacaatgtttgcaaaaggtcagctatatcaataggctgctttccactttgaatttgtttcttctttccttctttgcaagaccaagcggccatgtggtataaaagcaccctgaagcagatcttccaccttcttctcctctgatgcccatggtgttctcctctctctaacaccctgctactctcagtgaacgaatttgctcccaccgtgtttcgcaggcagggctgtcggtgcccctgctgcccccgttgcagtcccctcttcaggattttcttaacgttcaccctaaatatatactacctgaggccactaatgatgcatcaggactatttgtgtatagagtttctttatacttacaggggtaagtatcaaattcgtagcatatgagtttgcgggctaggagtcctcttacctatcagcaccctccgatcgacctttaagattgcgaaactctatgatagcatagagaacatcacgtttactttaagggtctttcaggtaaaaaagttcaatatcacaatagtagaccgagtccagaaggtcttctaacgatatacacttcggaagatcacttgcaaaggtttaagcccgtttgcgtttactaaggaatgagtggttgggtgagggggtttcttatagaagtaagataccggggcgacttccagtaaaagcagactatagctatactgtagcgaactggacaaccatacttccattacgaaaaaacctcgaatggacctagtggtgccggtagagcatacagaagacatctatatctagagtattcttatccttcgttcgtcgggggatcttgcgctcgaccggaaagggaccctctagaaactatgctatcattagccttatctcctctatacagaaggtatgatcatactcgtcgcatctgtttgtgggcgtccttattgacacggcggtgggcaaatagctcgaaatactgataaaggcgtcgccagtactcatcataagactacagcctttcaattttttaatcctttcttttattccggtgagaataataacatcatcgtcatcatcatcatctcgcgtttggttctacgaggtcaactaatgctcccgtggtcaccttgcaagtcatgtgatctcagcctactacctcaccgccgccttctctgcaatggtgcaaccaatgattatagcattaatattatatctatcttttttgatgtcttttgtacaactttttaaaggatccttatatgtacaattgcagaggtagatgtaactaaattgagaatgagaggccacttctgcaaacagtgcaaacaaacaaacaaacaagcaaacaaacgatcaacgatatgtggagtcacatgactgacaatcatgcagatcgtatcgaccagatatgtgtgtcactatttctatgtacagttgtcttggccagagaaaattagacggggatctacagggaagaccggccacccttgtacggtagtctctaactgctggtatgccatatcagattgaatttgacctgacaaacatgccatgcaagtacaagtagaacacagacctaagtcgccaattgtatccgttaagcagtgtttgctgcatatagcagacgtcgagtgtctaacaatacgaaatcacaatgggatatacagctatttgaatgtggagatggtgactcgttggggcaccaatcagcgacgagtgtacctggtcggtcgaatcgatcacttgaaactcaccaaaccccttcaactccttcctcgttccatctttttcctttttcgcgaattccacttgcgatttttgtcttttagctcttccgagcgtctgctctcttgcgatcctatggggtgttctattttctgattgttgtgaggtcatctaaacagctatggccgatatgtcgacacctaaacaaagtcccgaatacgaaggggtaagtggttcagattcagatctctccaaaaccccagcttgtcttgacacgagcttatcgcccttcgaataggagtcttttgacgacgcccttgaaaccgtctcaatccaggagaacaacaacctcaacgtcatcatccccaagtccacttccacccgatcgttgaccgatagtccggcaattggctcacatatgtctccggaattgacggagaaacctccgtcaccttctgaatcgcaggccgagcagaagagtgagaccgccgaggagcaaatcagggatggcgaggggctggatggacagaatgataagaacaataagaatatggggaaggggcaagatgaaggaacgggtactagcgatgagaataatctcgacaccaaccacggggtgaacacagcgaccgatgagcccacccggggtgataagccggaacaagggtccgaggttacgcagatagaggtcgagaagaacggagaagatcacgatcagagcccactgcagaagtcgcctctactcacgtcccgccgtttatcaacatcatcatcgctcgacgaagtgaacctgatgaacagcaaggaagacgagtcgacacacaaggcacagcgcccaggggaccaaacagaaccgcctccgttgcctcctaagaacgatcccgctcctccggcaagtgcaggcctgatgggtctgtcgggtggcctgccctcagtcccatgggcggctcctccagtgaacaagaatccgcctattccccagccagcccatcctcggaagcctagtggcccctttgcgtggttcactcgaagctcaaccgcgactaatgctaaggacatcaaatccccacccccctctgccagccgacgaaacactgccacctccgtatcgaccctcagcagcaacctagaccatctcgctcgtgatggcgacgacgtctccagtatcggctcaaagaagccgagacgcaatagcctgaaggatcaattcaagatgctacgcctacgcgaggagagccatgcgccagaggtcgatcagacgagcgtgcaatcgggccaagccagcgttagccagtctggagctagcccccctatcatcccagaggaaggagaggatggcattttggtagcgtcaggagtcgtttcaccttcgaggacggtcggtcctgggagaacgggctctgtggctgatgcttccatccccgtagactgggagatgtggcagcaccttgtgaacaacgggcccaaggccttggcaagctcagaggaactgaatgccgccattaaacgaggtatcccgcagacgatccgaggagtgatttggcaaattttggcagattgccatactggcgatatggaggatatctatcgagacctcgtggcgcgtggcacagcacaagacaaagatggacgaacaataaatggcactgaaagttcgtcttcacgctcttcagtccgctcccacccctcgggttccggctcacggtccagcagcgctgcccctagcccgcctaacgaaggagaaacagataaattgtgcaaggaacatacctccaatgacgccgaccgtcttaagaaagcaaagatagacgccgttgcgctgcagaaattggagaagaccataaggcgagacctgggagctcgtactagctacgcgaaatactttgtttcccaaggcagccaagaaggcctctttgggctgtgcaaggcatacgccctgtatgatccgggagttggatacgcgcaaggcatgaattttattgtcatgccattgttattcaacgtgagtataccctcaattaggttgactgagcttatgggctgacgttttacacagatggacgaagtcgatgctttcgccatgatggtcaagctgatgaacaagtactctctacgagatatgttcattcaggatatgcctgggcttcaccgtagcctataccaattcgagcgactgctagaagacctagaacctgctctctactgccatctccggcgccgtggagttcctcctcagctgtacgccacccagtggttcttgacgctgtttgcctaccgtttcccgctgcaactggtccttcgtatctacgacctgatattcgaagagggactagaaaccaccatcctcaaattcggcgttgcgatcatgcgacgaaacgcagacgcgctgcttgaaatgaaagatatgagtatgctcactactttcttgaaagagcgtttgttcgatgcctacattgacaagcagccatccacctcgtcaatcctagagtcgggcttcttcggaagctctggtgcctctgataaagagatttaccgatccgacatcatggtacaggacgcttgcgccattcctctcacgtccgagatgctcaccgcgtacaccgccgaatgggaggaaaagaccaaaaccgagaaagagcgtgaagtcgagctggagcacttgcggcacaccgtgatcacgcagggcgcacgtgtccgacttctcgaggaacgtgccgaagcatcagacaaggagcatgtgcaattggcttccgagctggtgcacgtgaaggtcgagaatgaggagctgcgcgacctcaaggatgcgctggaactccaggtcggccaacttaagaacgtggtcgacaagcagccggctgaagtggaggagaagctccgcgcagaaatggagcggatcatgaagcggaacatcgaggtgcaaaacgagaaccgtgcgatggaagaatcaatgtccgatatggagaaggagttggttgccacgaaaatgaagtgggcagaggtaagatattttatcattcagcgtgagatgccgagactgacgagctcaaacagatttccgaaaatcacgagaatctccgccagaaatggagcgacctgcgtcgtgccctcgactgattgtcacaacgttgcttctattagtactccacccggatagcaatattcggttctgtatatttggaatgcgcagatgtggtagcgaggatctgcgatcacgtcctatcctgcgcatttgcaccatgcttatgggccgggtcaattacttttgtcctgatttgctccctgtacctgcttttctccgttttgagccgacatcatgatttgcccctttacgactcttttctccaagctctcagcatgccatttttggaaggcatcggtgtttcgctaccttgtgttgaattatatttgctctagtgtgtatgtctatctccgatcctcgggcagggcgtactagacgtatgcatgtacatcatcaatggactttgttcatcctattatctagcttccgcatgtggccagctctctaccttagctctatactctctttatacgaagatcgaacatgcacaaatccatctctcgattctgactccattacagaatattctcatagtaactcgtcaacacatcctccttgacaggcgccgcacaagccttgagagccttgtgcgcctcacactcggtatcataatacttcatatcctccatcgaagcaaaagtcgtcttgacagacaagttgtaccccttattacgaggatcagggatcgaagcgccaacagcagcagcgaggatgtagggtttgccgtcctacaaacagaaaaagaaaacacccgttaataaccgttcaattgcgtttcattccgaatctcccgaatgacgactacgtggtacagcaagcatagtacagcatagtacatgtagccaaacagcgcagacaatgtagaaaagaacaagatgcactcacctttgtagcggtcttcgcgaggaccttgtactgctccagcacgcggtcgcgatccgcctcgttggggatcttgaagagggtgattcgctcgataggggccattgtttttttgagggtgtgggaggtgaggagtcgggaaatggacatggatttcagattctgggggaattaatatgaatttatacgggtttatatggcggggttacgatgggttcatatatgtcattgtttctgatacttccgtcgggttgtggggaggagccggagtagatccgttgattcatggtttgttaattatttccgctatttttgactaggttggtattgtttttgattgttttgtatcttctgtatattctagatgtctctctcttcaattgagagtttctttgctggggaaatagggcggaatattcttggttggagagcgcgcaatttccgctcgggtatttggtgtgcggaattggatattgaaggatgatgggattgtatttgtatatgcgtatcggatggatattgaggggcctcggtatattatttgtacaccattgccatgctgtggaacaaactacgcaagacatctgtatggcttactatatggcgcactagaggcatagggcatcgaccgaggaacttattagcttcactttataatacccggaagattgactagagtcctagattggatatgacatggtccatcgtatcaaacattcgctgggcactggtcacagattcccacgcaaagcctgttccctttcaaaggcctcgaacaaactcttgaaattcccagccccaaacccatcaaaggaattccgttgtatgacctctatgaacaccgtcggcctatccccgacatgcttggagaagatctgaagcaggtacccgcgctcgtcgaaatcaaccaagatattcagctgctcgagtacgtctacatcggccccaagcgtccaggacacttgtgtcaggcgcttccgcaaatccgcgtagtatgtagctggtacactgaggaactggacaccgcgcgcttggagaccagttacggcagcgacgatgtcgtgcgtgcggaaggctatgtgttggactccggcgccgtggtagtagtcgacgaatctgcgaatgttagaagtgctggtatgtgggtggcgtagggcagacgagaaagaagaaagaaaaaaaaacagggacaagttgcgtactcttcaatctgtgatttcttcttgccggttgcgggctcgttcataggcatcttgatggtttcgtttggtgaagcgatgacaattgatcgcatcgctgagtactcgctgcacatgtctttatcgtcgacggtccagtagcgatggaagtcgaggcattcctcataactaaagctggttagcgacagtcaaacaagaaccacattaattctactcactattggacaatgctgtccactcctccccacgactgattcccgacacagtggtcaatctcaagaaggttgatgggtggcaaaagctgtgtgatcggatcttcgctatcgagcaatcgatacccaggcaagaagggagcacctgccgaatacctctcccgattcaccagagtatgtacggtatccccgtacgtcccaacagtcgcagagacgatcgatccatgcccctcgacagaaaacgtccgcggctcagtgatagcgcgagcaccgttccctatagcccggttccatacagcttgtatatctcctgcgatccggaatgcgacatccttcaccccgtcgccgtgtatggtcaagtgcttatggatctcagccagcatcgcccgctcataaatcgaagcctggcgcaagataccgtcttccgggtcttggttcggtgggccacaaactggccccgtaagaacaaaagtagcgtcgctgttggctacaacatagctcacaagatagggcgagccgttttctgggccgcggtatgcaacggggcggaagcccatgcgagtaatccagtatgtggcagcttgtttggggttgccgacgtaccaatggatgtgatcgaagccgacatattcggggcccatcttggcgggaaagatgtcttcattttccgggacggtcatgatcggtgctgttgattgtggctgcgctaatatcggtgcaggtgtggaccgagaaacatgtcatccctacgccagccgttgagccggtgtaaggcggggacaagttatttatgagtgattttgaaaacagctgggtcggtgttgaggagaaaaatagaattctggcgaggaaatccctgcccagacgtgtcacattccaagcccgcgtctccggatcgagaggctatctaagataaacgtatgaggcaatgctgaagtcatccattaccagagctttgtccttctttggtgaaccttggggggttcaagttcaggcttgtatacccacagaagccgaagtgatgtttttgcacaaggtcaatgctgtagaaagaagccgctgttctccgtagcaaagcgcgaggccatgtcagttgggctggctgtgcatgtcgcaaccctttcatccaagtcctgcggctgtatgtgttgtacacaacatatgccatttccagatcccatctcgctagtttatctcattccaaggcgaaagtaaaatccccaaatcagcccaatcaaacagttgtcacgggctccggccgactcttgaagaaaatcttataccgcacaatctccacaacctccagttcctcgctctccgccgcctgtcgtctctgtagcacggcaatcggccgcggcagcttcttgacttcgccagtcatccgctggtaccgaccgacatacatgtaagcgcgcttcatccattttgtgtcatctgggttgtgaaccgaatagtctgggaacatgagttttccgatcggagtttcgaaggtggaggctggattatccgtagaggtagagtagtctatgtcatcttcgtcccccgaggggacattgattgtgccctgtagttcgagaagggctaggcccgagggtgtttgaaggagtgctggaaggggattattcggtgttgaggcagtcgtagtcctttttgctgagccagagcagcgtggttgtagctttatggagggcataatgtagtcttgatgtttcaattggagttgaaggaggaaaacgcgaacgcggcacgcgtttgggatttccccacttcttatcgcgagaaatgggtaattatgggattacaagcacggaatataactatgatcacatatattatttgtaatactgatgcttgggataagagtacgtacatgacttgagtacatcaataactagaccattgtgtttgttctcatgtcatatcaggtaaacgcatagtctttgtctaaagcccgtccaggaatcaagagttatatcgtagtagaagtaacaatgaggtagctttgctacaaatcttgggcttaagtgtggctccaaactaatcgacaggagctttagtgtaatataagcattcttccgaggccatggccaagatttcgacatgtaaataagagtggaatgtaatagatggcctttcaagagaacaattttcgtgtgattgccacgaagcgcaattagctcgaccctataacatagctctggaggcagaaagtggtgaaatacaggaagcgttcagcaaacatagagcttgatacctgtatgaactgccagacaactctcggaattaggattcagacaggaaagcgcccgtggtattttgcattgtatctgtatatgatttatattagtcgaggtatttttattgacattgagaccataccaacagttcaggggtattcaaataacaaatgggcacaatacacaatgcataatgagcagaagcatacctctcaagaagcgctattcttatagcaaacatcctcaaggttctgcaggcccttaatagcctccccagctatatcttcggcagtcctaggaccctgtaatttgccgtaacggagatcgctcatatcaccaacagtcgtattgagctgagctaaaatctttgcagcctcttgatcgatcccagcaatttcacgctcgacattagcgctggccgtctccatttcagccaggagactagctactgagtgataatttcccggtacagcagtaggtggttggccaaacagatgaacatccatgtccatttcacgctcttcggaacttgaggcttcgactccagtggctagaatggcttttcggagctccgctctttgcgtttcaccttgcttgatctcgttgtcgatgttttcattgactcgatccatgtcctgttctcggacctgttgcagctcccgatacaaagtcctgatgtgtggatgggatctcaagcgctttgggaagagctctgtgaacttttgcagcgagatgactgttggtagcggggctggagagagcaggaaattgctcaggatggactcctcagagggaggcatgatgaatgtgtatagtgtagtacacacaatatgcagagtatagtgttctcttcttctcacaactgtggtgtagttttgtctcccgtttgacgcgaaccggaagttgaaaatattcacgtgaacaaaagaatatgaaaatgaatagaagaatggaaatctattcctattgttatggaatagtggaataaacagacgaatagacgaatcgttgtcaatgtcaaggtgacaataagctgccgcgcttaatttcttccaaggggccactcctcttcgcttgttttccttcttcttcttccactctacttcgtctacctcgtctacatctacatcaacttgcctcaaccccattctctcttcctaaaatcttgactctctctactattcctgagctggtctcgagtctgatctattcttgttccttcttacaccttcttctactttgctgaatcggatttgctgtcaagaacaacttgtactgccatttgtgcatcttcctttcttcctgtttttgctcaagtctgcatctagctgcggtgttccaattgaagtctctgaaggcttccaaggattttctgatcgtggctgttaccgcctgtatcatacctttccctgcgagacaggaatcatcttgacatctctacacctttgagctcaaaggtctacaatctgtcatacaagcttcgacaagcacgtcttctacctttctctgacaaaatggctccgatttctatgtatagcaaagacgagaaggtcctttgcttccaccatgagatcctttacgatgccaagatcctggatgttcgccacaaggactccactgacaagaagagcccctttgaatatcaagtccactacaagggctggaagaatacgtaagtctggcttgtttcatttcttcccctgtttatctacgtcctggcggtgtcaagatcgttcccctccaaaaccttggaaagtttgtccgggccaatacggaagacttgaactcgactttgagctatgcacactctctgttatgcagaattgcgtcttgttttctgccgcacatgtttcagaaaagaatatatccatcattcgatttcgtggaacattctaacattggaacagctgggatgactgggtcctggaggaccgtcttcgcaagcacaccgaagacaaccgcgaattggccagcaatctgcgtcgggaagctgaagcttcattccgtctaaagaacaccaagatcactgctaagaagcgtgcgggttccgaccgtgactctgtgcgggacagcgaggagcgcggctccgtgcccagccgtggcaccaaacgagcccgtgatagtgaaatcgaaaaggtatgcaattaacacatcaaatcgggtgcaatggaaccaaacccaagaaaataaaatacaaaaggaccgtattatttatgatcccatactaacaatcttcaggaggagagcttcaatatccgcccctctgtgcgcatcgtcatgccagacaatttgaagtccctacttgtcgatgactgggagcaggtaaccaagaaccagtgcgtcgtctctttgccggcgaagtacccagtccgccagatcctgcaagactggcacgaggaagagctcccaaagcggtcgggctcgtcggcagacgaggacgtgctggaggaagtggtcgccgggatccaggagtacttcgacaagtgtctggataagattcttctctaccgccacgagcgcccccagtaccgtggcctgcgtaagaagttcgaggccgctaccggggaactggccgataagggccccatcgatgtatacggggcggagcacctgatccgcttgttcagtatgtactcaccttacttctgcttcaactgtgagagttgggaatcgtactaaccgttgcgtgtgtaggcactatgcctgagttgattgctcagaccaacatggacatgcaggctacgaatcgcctgcgagaggagatctcgaagctgtccatgtggttgagcaagaactccgagaagtacttcgctaccagctaccagccggcggagagcactcactgagtgcgagaagaagcttctcttgggggaggaaaggggcttctgccccttttctgtgttgtatgcgttggggtgagggtggccacccttccagcagcagcttgtttttttttttaagattttcgaagaagcgcgggcctgaatagacctggaatacaagagactttgcttagctatatcttaatctccaagaagacgtaggttctcatgagattggagttacgatctgtactagtagttgtgagatcaaaccctgacatcttgatgctactactcggtagttattacagaagcaaggcaataatgagtcgatgctgagataagagaaaatatgaattttcaactggatttcttaatagaaaactcaatgataccactacctagtgatctatcaccgacaaaactcttgaattcagatcaacatccaagatccacaaaattagaaggagaaggaaatgaacaatccaacaatctaatctgatatctaagcaaccagttgccttgcatcatcaacagcccaccgcgccgcacgcttcaattcactcttccactccgcctcacgccacttagcccaagcattcaaaccctcaggcggctggatactcagcgtatcatagccctgcttaattatacggtggacctcacgcggggagagattcttcttcctgatcgacggcaacgccaccggcacaggctcatcgcctttgggactggcagccgccgccgccgccgccgcagcagcagcaacagcagcggagtctgcaccctccgaatggaagagcagggtgtagaaatgcgtagatactgagaggagggtgtcgatggctgctgaatgcagctcgttgggttgagagattgcatcggctgcgattgcggtattggagcgggacagtgagtatgcatcgcggaatttggagataatggggcctgtctcgacaagcttatagaagaggtcatcgtaggaggctgggtctgggaggaaggtgtcgccgcctgagacgcagaacgcgattaggtctgcgagggaggttgtgagggtttggattttggggctgctggttaaatcggaggcgtaggttgttaggaagcgcatgagggagagcagagtccgccagagctcggaccagtggtaggcgaggcggatcttgttctttgagaggtaggttaggaggcggagagtgattgcgattgtgtggctgggaggcttgttaggaatggctaatggatacagtggatggttgtttcgtacctgtaaatgttgacgtcgaggcgccggcgaaggttatgcgtaatagtatcgatggcaatatcaaatatgacggttgcgaggacccgctctccgctgactagagggagatagggctgtttctgtcgacagatgcgtacctttcgcttgacttcctcgctgcaaatttgcttgcagatgatcgggtcttcgaccagaatgcgaagtgtgaataggtttagttcggcatagtgcccgacccgcggggatcgatatgcatgttgaagaagataggaggacaatgataggaagctcgaaaaaggggcttctccatcgctggtttctggtcccagatgaaccaaatgataaccaaagagcttattggcgtttgtgaagtcgtacgtggccattagaattgcggcttcatgtgccggactgccaggattgtaagtttcgaatcaagattctccgtgcagagaacttacagatcagcgaacatggccttcgcttcttccgccgaaggtgggttcgctctatccctggcgcccggtgcgagcgctcgtagtccaaaaaagattaacgtgttggtgaagctccagccctctggaatatcatcctggacagcaatatagccattccgcaggcgattacaggccagaccgacacccttggcaactttttcaatgcttgactcgttcacaaaatcatcaagccgaagctggtaggggttttggaattcaaacttgttgtagttggccaatagccccagaaggaggaatggatcgaacacttgcagcggggtatcagaatcagaaacatactattagcgactgtcagttattttcatatataaacaatatgagtaactcaaaccttcatgagcgacgggaaaaggtccctgtgtgtaagataggagaccaggctagttttgtatgctccactagtcatggcaatggccgtcttgatagctttgagccgcacatcgactggaaaaattaggatcaactgatatgatctcggttaagagcagaacaagcaatgacttacagctactgccattgcgaatgattctgtccaaaacggccacgaactcggaaatgacatggtccacttcgtcgagtcctgcaagaacagtgatgacatccgaacttgggtttgtgtatttcttgctcaaaatgctcgtcaagaaaacagtcaaggtctgtgaaacaaggttagacaatatgtgccggatattgatcacggggttcttacatctaatgcataagaatccgacggggcaaccccagctgctgcctcgcgagtggcacggacaaagaaacgccgagtttgaatctaggggttgtatcagctatttgattattgtcttgggcgctttttgtatcatggcttacctgtagaccaatagtatcgtctgggctcaaatggtctaggatagcatgtagttgtttccggtctggaggcagcaagaaaaattctctccaaaagccctccgaggggtctgcatcatctgctacctattaggagtattgttagcaatatttcataaagcgatgttcatacccgtactttgaagagattctcatagagctggacaatcttaggtttaaaggactcgggtctactctgctgggtaaggggtgaggcgtccatgatattagacaggatgatctgcaacgttaggtcgccagcattggacctcgagaaccaaaagagtaaggttaatataaagtcgagttgattccaattgcttcgaggttcataaaaagggacaccagccactttgtcagccgatccagccacatgtcctctacacttggcaatgtgtttacgcattgggagaaaatgaacaaattccagtatattcgtgaattaacctagtggatctatacagttcataaactttacatcttgatccttttccccgctactcagctacatttagaggtgtgggtggcatcttcatgagagagccatgtctctccgaggaacggaatgctccgcggtgtgggatgactcagcttccgaaaaacgcattggatgacaacattggaaatccaaagcagatcgcagttggaacttgtcattctaccttggtagctggattaaatagggcaaagacgaatcagctcggctcctaagtcagcctcttctcctgattagtctataattagcaaatcaactgaaactcgagcaatggcgccactgctgcactgctgttgtgtagaaaccactcgacgctgattggctgggtttgcgtcatgcaacgatcttatgtaatccacttgccatgggggaatcctcaaaacagtcagagattcttctcaactttattactcaatcctccattccaccatttttctcacacaacatcctatgatccaatagcaatttcgtcgaggttcactcccattttacattgattgcccctcgactatgagcttctctaccaccatgcaacgtccagtgacatcatccgccacactcctccgatgggtaaagccctcggcaggacgtctgcgtactttctcctcatatggaaacgcttacctagcctccaagcgggatatgcaaaccgcaactgcctaccgtcctcactcgctcccctcctcattcccgcctcctcgaagcaccggcggcgccgacacttccatttcagctgaattcccttccgacatgaaatcataccgcaacacatcacaaggcacattgtccaatgtgagcctacgggaaggcgaggcgcaaaaatccaagccgacttccgcttctccgcccgcctccaagacttccccgaaaccccgtcggccgctccggccaagaaaggccgccatgaaattgtccacattggccatcgagcagcttcgcaagttgatggcacagccggagcccaagtatattcgagtcggtgtcaagaaccgtggctgctcgggtctcgcctatcacctggagtacgtggagaagccgggaaagttcgatgaggtagtcgagcaggacggcgtcaaggtcctcatcgacagcaaggctttgttcagtattatcggcagcgaaatggactggcaagaggacaagctgagcagacgattcattttccgcaaccccaacatcagtaagtggcccctgcaagaattacagcatcctctatagattcgatttactgactcacgattacagaggaagaatgtggctgcggcgagtctttcatggtttaagcacacggcttgatcattccttttgatatgtttcttatacaggacctcttggcgtctttcttctcggtgcatcggacggcgttttcaaagggggtctgggattccacgaccaccctcttgtttgagtatatacgcttgatatccagttgataccttttatccactttctttctgcattttctactgcgtctcgtggtcactgtgggctcacaagtggcgagccatgtcaagagacaggctagaggctcaaccaacgaggtgctggcttttctttctctgcggagacattcttttgaaccctcgcaagatcaaccatgtgatatatttgtgtatagattagtccgaaggacattgatgacgacatatgacatatatttagctcaaaaaaatcaaaaaaatcaccataaacatgttttctcgataatctattcttttctccttcctattagcttcctattagcctctcagtatagtagaaaagtcatagtatacggttactgtctagaatgcgtcacctgactggatataagccgaggccccggaatgggctgagcgccgcatctcatacataccagtcattgcttgtatagagcggtctcaatccattccacatgagagcataggattaactgttacctaaaacatgacctcacccttcctctctccatacgcagtcggcgaaccagacaccgagccgctcctcatcaccgtccgcttctccgcctcaatccccgacctccaactagacgtcccagagcccgagaccacaacaggcgcaggtctaaagcaactaatccgagcgcaactcgccaaacccctgtcatcccaccgactacgcctcatctacgccggccgcggtctcgaagacacagccgcattaacagcctcactaaagctcccttcgtcaccaagccggagccctcgccccgtagcagaccaacccgagacaccagaagaaaatggcaaaggaaagcaggcggtgcgcgatacccgcccacgaatttacatccactgctcgatcggcgacatcgtactctcagacgcagacttagctagcgaagcaagcgtgtcatcaacgatccttctgcaacagaagcaacagaaaactaacacaggaaagaaacttttcggcaaggatgtctcgacatctcgtcactcccagacccagacccagacccagacccagtcccagtcaactaccaccacacccgcaccccgcggtttcgaccgcctcctctcggccggcttcacggcggctgaggtcaccgctctgcgctcccagttcctggccatgcagtctgtttcccggacgccggatactatgcctactggcgaccagttgcgggatcttgaggaccgctggatggatgaggggtcgacggcggcgcaggtgcagggtgggtttggggaggggggtggtatcggggatgacgagggcgggattggatctggatcgcgtggggcgatggatgatatgctttggggcgctgttatggggttcttttggcctgttggttgtgcgatgtggttgcgcagagaggaaggggtgtggagttggaggaagggggtggctgtttgtgtgggtgttattgttaatgctgtttttggggcgatgaggattatgaactgagggtgttgatatgtatatgtatatatcattctttcttcttatttggcgttatgagatacccccaattgaagccatttggtacattctaattgatacgtgagatttgtctaggctattaatcattgtattagagaccgggattgcttggactaaggatttgggtctagctgtgtaaagactcgccgatgctatcatactgtatacataatggcaaatatatgagagacagagacggacagacagacaggcaatagccttgctagtaagagcaggaaataaaaggatatgagagatcagaccgagtatacaaacgccagcgcgaaactcaagtactaatggaacttgctgaaaatgacagcgaaaatcaaaagaaccagaaccgtaataatcgcaatagtgatcatccgattggtagccatcctaaacaacacacaagaggtcagcaatcacgtctatatatagaagaacaagacaaaaggggagtcagtacctacgggccatgcccctcaaagtcttgatactagtatcaacgtaaccctcactctgctgcaagttgttccgagcattcgtgatctgctccctctgctcgtacagtgtgccgagcgtgccgcgagcaacatcctcggtctccagggccatgcgctgactctgctgcagccgtgccgaactgcgctctagccggtccgtaccggacagcaactgctgtctttgttcgaggtgctcatcctgcggctcgtcggtgtatcggtcgccgaatagtgcttgccggtcatccgagagggacttgagcttgcgcttgacctcgtcgatatcggttgagtagttgcggaagcggatgttgacttttgaccgggctgcggaggggatgttctgcttctccatgcgcatttggtcgagctagatggggtttgatcgggttagtttgttctgttcttgtgtttgttcgttgttctcgcattgcggcgcatgaaaaccgggtgaggggttcggtggactcaccagttctgttgcttcttcgaggacttgcgttgcgttgccgattgctgatttccgttgctcgccgcttgcctcggcgatctggtccagcttctggttcagatcggcttgcaccagcttcaactcgttctcgtagctggcgaacatctccgagccggcatctgtgttcaggtttgacatcgtgattgtatagtatgtattctagcttaggtgggagagaagatctgctgtctgcaacggtagttgatgtgttgatgtaggctccacctttatctggggcgggtgacactgttcaacagctgagtggcggtcaacggatcttgttagtgtggcttcgctttgcaaccgatatagactgtttttttgggagttcttagggagcacaaagagaaaatatcgaaataaccaaaggtgctaggataagactggaacgtgacggtgagacacgtgattaatctaagtcgggttgcatttgcgacatgcagatgacatctatataactagtactctatttaaacctacaaccatttatcttttagatgctgcaataaaccggaaacataatttgatacatagcattagagtaacaccaggcccatacaaaacaattcgccttttcaataaacatcaaagatacccctttggtatacaagatcatggaactttctcaagccttctagccatttataacaggaaattcttgctatcttgatcaacaatgattgcgctacgcttggcatccaggaagagatcctcgcactccgcaatatcggcctcctcaattgcgccggggcggccattgacacgcgagagaatgcttgcgggggtcaacagctgcagggcataccgcaagctgaccttgcttccatggtcagcgaccttgttcaaggcaggctctgtgatattgaggccttcaatcttggcgcgcagccggatgatagtcttgatctcctcgggggcgtaggggttggtggggatgataagaaggcgggcaagcagatcaggtgggataccgtgtgcggcactgatttcagtaccgcgaataacggcgtggccacggttggaagcgaggatgacaatcggggagatggtcgattcgagggcgcggttcagatatgtgaagcactcaatgtcgagcatgtgcacctagacgaagaaacgaagtcagagacatgatccaataattgacagcataaactttctccacgtacctcatcgatgaagagaacaccgggaaccaactctgcgacaccctgatcaatgtacctgttgacaaccttgttgatttcctggcgcaacttgtccgtgatttccgtcttcttgggcttcatcagctggcccatcatactcatcacgtcttgtccgccctggggtcgggcgttggccatatccaggtcgtgaagggtcacatcctgaacaatctccttcttcttgtgaacctcacccttggggacaggcacatactcctcagcctcaagatcgaattcggtagcataggcatcggatcgcccgactcgcttgcatgagccggtgttggcttcaatgtagatgacatctccgaccgtgacacgctctttctggatggcttcgtagatgctggggtccaggcgcagcttcttggagcccttagcggacttcaatccgatgatcaggtggctaattgtgcgcccgtatccgcccagtgggttctcagcctcctcgggggtaagctctgtcacctctccctcataaacttcctttgtttcgcgaacacggaggcctgtcatgcgttagcttaattttctagcttgtggcgtttttccctgatgtcgtattgcgtaccaatagctctccggaagttctccatcagtgcttcagtcttcttgacctcagcggaatagatttcactgccaacaatagggcagaaaggaaccttagttcctagctcctgcgatacagcaagagcaagagcagtttttccggtaccagggccaccagcaagcagcacagctcgtccagccatcttctttgacttgatcaagtccaccacaacaccgcatgcctgccgatggtttaaaccgttagttatcgttactgcgaaccagataccctggattcagtgttgctatccactcacctcacgggcagctccttgtcccacgaatccatccgcattgtgctccggggtcccatcagagcgtaagcctagaccccgaatgtgtgtatgcgctgcggttctgttctcgcgcgagttccccttcacttcactaatctggaccatgtttgggagagatgtggccgagtagagccacgggtattgacgagagatgggtcaatcggttgaaaagaaggaagtagtaataaatcaaagcttcaaagaaatagcctagatcgaaaagaaaggtaacgcgatggttctctgtgagataatgcttctggccgaaattcgcgagcaagggatcggcgaatgagaacgccgccctcaaggcggtgaactgccccaaattcttccctactggacctcttcctccgcctgttgtctactaacgactttccggctttttgtgttctcgacactctgcgagggtccaatagctgtcaaacacaatggcaggcctacacgcaagatccgcaatggccgcccccttctctttggcctcggccttccgcagtctttccatcgccacaccgaagcgatccttctcaacgacgccggcaacgcaatcagttccgaaactaccggaaaccgccccagtctacccctacggagaatccaagtggtacaagcaggctgactccggtctctatggaggcgcttcgatccgattcggcaacaagatctctaagggacgcaatgcaggcaagacacgacgaacctggaagcctaacgtccgccgaaagaagatcgagagcgaggctctgggcgagtcagtgtttatcaaggtcactcgtcgcgccttgcgatcaatatacaaggccaagggcctagacaactatttgctgtctgatcggccaacacgcctcaaggagctcggtcctttcggatggaaccttcgacaccagattatgcaaacaccggcgatcaaggagagatttgataagcagcgtaaggccttcggtattcctgagcccccgacattgagcaaatggatgagggaccacaggctggagatcaggaacaaaatcgaaaacctggacattgacgccatgaccaagcctcgcgtctctccgcgaagcagccagtcgtatgctcgctagaacagcttgagcgaccttgcgtgccgagggaaatgaacaggcgcttgtaccactatcctgaagatcgatggacggttttttgggcaccgcggattttgtgccatctttgtacgctatctcgtttcttgtggtagaaatgatggccacaaatttctaatttgggtgcggtctctttttcaatttgcgtattgggtcttctgtgtattatactccaatctcactgcgtgttcacttatcaagacgtttcattcaactccatctttacgccgagtctataacaacaagtatgtataaacggaatatagcattccggtcaaaatcaaaattccgccgatccaaagaggagtggatacatgagtgtatcgtcgtcagcctccaaagcactgccaatcccgttctcaagggtagaaaaggcctggacatgcatgccagccatcgacctagcatgatttgattcacggaaaaaacggatactcttcggagcgcatgtgactatgcaaaccacccagcattatttggtcatgcgatgccatcatgcgcaagacaccccgatgcatgatgaccgacgtcagcaaaggcatctgagattggatgtgggaagcagactccgccgagatgtgcctccgttccgtagactcgaattcttttggctagaacatcgaaggcatcacgtaaaggttcggcttgaacccatcgctcggcgaggataaccagcgcagttgagcaggcgcgtaatgcttctgggacttctcgtgaccggtaggcaatggttcaatgctaaggtggagttgtcagaagcagtatagaagggtgatacctacggcgacttggctcaagagctaattaccagactaggtcggttgatagggaaaataatcgagggttaccagcacataccccaggtcataattgtgctgtttgtcggtctttttggaaagtccttgccatagcaatctatattgtacaggctgagactggctggtgaggatcgtgaagttataagccatgccaacccatcgatcgctcgtgtagcgttttggggcaacatcgctcaatagccgtaattgagacctctaggagtccagttcacccaacatatgttctcgccatgtcgttgaggagatttatttgaaatttgtaagcgtgcaaagcttggggaagatcgatatgtgtattcgtctagctagttccatagagaaggtaccccaaggccatatgaccgtcgagacgacggtaacatctgccgtgccaggaaggatttgattgattgtcagcaatgattagatttcaaagccaagtatgcaatttcaccattgccaatcgcgttcctggtaccaatccgtgttacgaggtcggaccagtccgtacaagacgtagttaaaatcggaccagttctcgttgctatcgatagagagacccattcaaaagcccgaaatatgcctagagatatagaataagtaaattcacttttagcctattagataccacgcggataaagaatatcacgtgcatctttccggtcgacttatcatagataagcttgctttcgtgaggggaaattggctgaataccgcatgatacaagctctcttatggatatgttagctttataagttcaatgaagatagagaatgaacttactggtagactcgacggaactctttacgcatagcgtcgcggacttcaggcgtctgcctccagatatacagcttagatagcggtacccctggaactttctcccagataatataggtaatgaagcctgagggaataatgtcgtctgattcttactatgcttcttggtagctaagaagcttaaaaataacctcacagcccttctatatgagttccttcagtatatctcactcattcgtagtttgtgttatagtctgctttacttaaatacttgacttcgagatctgggtcccagtaatagggatctgctggtagattcgcacaaatgctggcctctgagctgggttatctttacggtagcaaagaaatttagcggcaacatatagatacctaaagcctttttcgatgtcatgctggtcttcgggataagaaatttcattcagcttcgcggtgattacccatgtcacagacggcagcagaaggtttgtttgtcttagcgtcagtggtgatctcggtgcctacaaggtcacccatcaaatcagtttcagcggtatccatgttggacctgtagatttccttgataggggcataggctaggggtaaaatggttgaggagagaaaagaggagagactcgagaggtatggtcctggatggatgcagggagtaactgtagccttggaggtgtaatctatgagtaatctatttggtaaacggtgacgggtctttccgccgacaggaaaactaaataaaacacatattagaaactattctaatcattcaagccagacattattgagataaccaagttgttgcatcatcttaccgtttactagaatcaaaagcggtatataaagtagggctggcagaactacccgcaagcggtaagagaaatacaagcgcagaagaggaaccagagatgctgagaggggtaataattatttatttcgagtccttttgaccttcgcttttgtaatattttacctcggcaaggaagacaacactataatgcctcagaaaattaccgtggctgtggcacaagcccgcactctgtctactctcgagttgaccctcgcttctctcaaggaaaccacccagcatgcagcttcaaagggcgtccatcttatactcttcccagaagcctacctaggcggatatcctcgcacttgtgactttggaactgctgttggcgcgcgtgctccctacgggcgggatcaatttcttgagtacttccgtgctgccgttgacctgggcgatacgcctgctggagcgggagatgactgggtggagcgtaagctacccgtggcccaaggtcgagaccaccgtggtgatggaacaagagagttcctcgagcggctatcccgcgagacgggcgtctttattgcaactgggttgattgaaaaggccggggggagcttgtactgctctgcgctgtatgtcgatcctttgaggggtgttctggggaaaagacgaaaggtcatgccggtaagtacatgcaaatcaatttttgctgtcatttatagtcaaattggaagatatagactaatgctgacttgaaattgccggaaaaaagactggctcggaacgtctcgtgtgggcgcaggggtctccttctacattaaaagctatcaccacagagctgaatggagtcaagcttactattgccgccgctatctgctgggaaaacttcatgcctttgcttcgtcaaagtctttattcgcaaaatgtgaacatctacctcgcacccacagctgacagccgtgacacctggctgcctctcatgcgcactattggtggcgaaggccgcacttttgtgctttcttgcaaccagtgcgtacgctacagtgaattaccgtcctggatcaccgagcagggtaaaaatacagaaggtacgtggtatatgatcaccctcagtttgcttacttaggtgttcaaatgactcattttctcttagaagatccagaccgctatatctcgcgtggtggctcctgcatcgtcggacccttcggcgaagtcgtggctgaacctatctggcaagtctccactgacgatgcagctgatatctctagcatcgaaaatgcgcttgtgatttctgacatagacttggaggattgtgaacgaggccgacttgacatggatgttgcgggaagctattcaagagatgcattccggttaacggttgacgggttggacctgaaccctcctccgttctaggaatcaagtacaaaagaaatacagttgggcaactctcataagaatgagaaatcttggaacgcctaactatgccaatacttggacagaaaatgtggcgaaatagtgtggcacaaggtgtgtattcagatgtgtatgtacatactagggccgatctataaaatatattattttgcctcgcttcactcagcaaaatcaacaatatttctttcgcaggtcttgtccgatgcaaaaggactgtacatcaaaccaatcaacaaataatctatatgttatctctgatcattttcgatcctaaataggaatttccgctggatgcggttcgctaatggaagttggaatgcggccagcagaggtgggccggattcagacgccaatccctcgggatcttcgtacccgcgtcgatcatcaagttcccttcttcaatactcgatctttgaccttgccatctttcctattatgacttgatttcaacacaaacactgtcccttgtataaactcagggataagcacacgccctcaatgcagttcgcgttacctccacggcggagcccgcatcgtctacctctcccccgttcctctcgaatgtcatcccatcgcaggaaacagttaaaatcggtcgccgtcctcgcaatcgcaatattatcccttctctatctcatccattacctccactccccaacctccatgtccgtggtggcttcggcgggtacttctggagtggtaatcgtcacactgctagaccgtcaacggtgcagcgagagctatctcaaaaagatcattgcaaacagggaggactacgccaagcgtcatggtaataaacccctatacaaagcagtgtggaggagcttcgcaatgaacttgatctaactttcatgcgggaacaggctacaccaacttcttcgcgaaagtctcagattatgacgaagccgttggcgatgctcccatgagctgggccgttgtaccagccatccgtcatgccatggcttcacatcctcactcggcatatttcttccatctcgcggctaatgctttgatcatgaaccctaccaaatccctcgagtctcatattctagggcagggccatctggaaagcttgatgttgaaggatgtacccattgtgccgccagatagtatcattaagaccttcgtgcaccagaaagaacaggatgtggatcttatcatcacccaggacagcgaagatttaaacccgggaagcttcattttgaagaacggggagtttgcgcgtttcttcctggacgtctggtttgacccgctttaccgcaacttcaactttgctagggcggaagcccatggactggtaagagaaattttttactctattactctatctttatatagatagcgcttcgagagccttgattctgaccgacactttgctaggatcacattttgcagtggcacccaactgttcttgctcgaaccgccttggttcctcagcgcattctaagctcctatagcaaagactcgccgggtgctgctttggacggcacctacaaggatggtgacctcgtgatccaattccatgggtgcggtgatgcagagggccgagactgtgcccgcgaactagagccgcactacaggctttgggagaagaagaaacagagagattaacgttcttgaagtgacttacattttggggtccacagtttctatgtggggaaatggcgttttgcttgggatctttcttctgttcagggtggtttacctagttataatgttctagggttgatcagcgtttggtcgtggagacctcaacatatggcgtatttttgctttcattggcatgcatagctgcaaaagggacacgataattgttttctatgtccaataccaaataatacatcatctcatgatatcagtaattagtgcataccgtttatcatgacaactagggttgatcgataagctgctcgagacttctttcaagccatcaacaaagacaatctaatgccttgctataattttcttcccttttcccactcaatcactcagcccatggccatagcatatgggatcaccaaataccagcctggacttgaacattcggccaacttcttaagcaaggccggggaagatgacagagcgcttcttcttatacttgtcaccaaactccttgcggtagcgatactccttcttccaagcccagctccacatctgcaacccacccacagcaacgaagatcagcacactccagttcaactggctgacaaggaaaatacccaaccaagccagaatctcaaagaagtagttgggacaggtaacgacactgaagccgaacccagacggaatgcctcgctcagtggtaccgggccggcggagattacgcaggatgtagtgcgcattcagattcgccagctcaccgaagacaaacagcgccagtccggcgtacacaagagcctgattgggggtactgctggcggcggtcgcgtccggacggaacacccagtaggcgatgttgaaaccggccagaacccagtagtgggcgctattcttgacgatgttgcgggcgggcatggtggcactgctgaaacggtgcacgaagattgtctcgaactcgcgcttcaggaagtgcacgcttagcagtgcgcagactaggagctggaggtttgagggcgaggggaggggcttgtcgaaggtgaagtacaggaggggtcggagtgggaagaggaagagcgcggggatcaggagtgggccgaggtattcgatgatgaaaacggtgcgccaggcaatttggggtcctgaagaactatatgttagcttctatgtgcgtggagaagagtgcgctggtcctagggctggattcgcattgtccatgatatgggggaaagacacgcaccgagatccttgacgtagatcacgcttgagtttaacaggccggtatcctcaatggtgacattgttcgagttcgggaccacgctgtggtcgctacccttggtgattctcatccggtgaattgagcaaccggatgctgcggagagcgcaacgtgcaattcttcactagaggcatcgagagatatctcaatttccttagggagcttgcggatgggcttgcctgattttagattagcgatgctcttaagctactctctctgtgatcgagcgatttgagaaaaagagctatgtatgcgtaccccttggctgaacgacgagtgtgattttatcagccgccatgatgataacgcagcttaagcagatacaatgcttaaagatggggcttatttgagaccaccaagataacttgaaatcgcgacttggctaaaaaacgtgcttgtcccaacaatctacaagttgggcctcggttgacgtcacgtgttgacacctgaggccacatatccaacgtcgcaatattttgcaatagttgggtgtctttcccagaatggcctcccacggtaggttgccttggcagcttactgaaaacaggggttcgtatggaatactacgatctttgcatcttggcgaactagcctgtggctatgcctgttgctctagatgtcttttgttggagattcgactggcctatccgccaatggcacactgtccaatgcagtattccctcgaggccagcttgaatgtcatcatttactggggcagcaaaggctatatatttcctccgtatctgaagtcacctggcctgtcagccgaaacaagggtatccccggaagctaacgaggccgaatatgcactgtagcggggcatggtggttccagggcagtgctggattttgtgggagctgagaaaaaaacaagctattgtaatatcaaatggcaacgtcaaatcagaatcgaatgatatcgccccatctaccccataggtttcagctccatcttgcacggttactttgaccgaacagcatcgtcagcatcgccaatcattgcccaaccaagaaccaagacagatcatagaagttcattattagagttttttacatgccattcgtattacattgtgattttctctctatgaaaacataactttttgcatagcctgagcgcatcgcagatcttcggacccatttagccgctgctactgccccaatcacagtgtgtagttcgatccacactacgaatcgaaccattgaatgtgctaatatagctcgtgtctatctttatctaggcagtcgtaatccgggtcattcgccataattggctagacaaataccataagacctggtcgacagggtataccccgtatagcatgcgcgaatcagagatattcgattgctcatagcagccagtggggcggtcctcttcacacacaaggtccaccttacgctaagaacgaccacgaatgagggcgctgctggacttcgagaatgtgatgtgcattcagccgtacgctttgctcggatggctctctcggcttactccgtgattaccacgggaggcttattataataatacacacccatttccaccgaaatgatcgcatgatgattcacttcgtcttttcctaattacctttgatagttgtgttgctcttttgcttccatatatacatataccggtaagcgactactattgtctttattgttcgactttcaactatacggcctcggctcaaggtcaacctatgacctcgaagttgacagattaatcacagttcgcactcggatttcttctgtatctgtattataccatctcaattcaccatgtctgaggaagagtccagcagcaagattgctcaggttgagcaagttgtgtctgcagccttgcggcccttgcccactcaaactggcgatggcagctatgtacaagagccaaccgtgacaggccttgctaaggacctactccactttgacctgaaagatgccaaaactttagcggaggttgccaaaactgccgtgactggcgaggctgtgaatgacagagattatatcatggagcgcgtgattcaggtttgtattttcgcgaggaattggctatgttcccactctaactgttctacagcttgctgctggcttgccttcgacatctcggaatggcaaggaactgaccaataccttcctcacccaattgtggggtgatctacagcacccgcctgtctcgtgagtcatgcaatagcgatgttggtctgtgtgggaaatgtccagtgactaactagtgatgcagctaccttggacgcgaggcggcataccggaaagctgatggatctggaaatgtaggaattgttcccttatagatcgagtatctctgctaaacagccctagaacacattttggcctcagattggtgctgcgagcaccccatatgcacggtccgttcgacccaagaccatgcagcctgctgctcttccggagccagaggctcttttcgatagtctcttgtcccggaaggatttcaaggaacacccgaacaagatttctagcgtgttattctatcttgcctctatcattatccacggtatgttatttctgttggttgagatctttgctataagagacacaagaatcaccgaggctaacagttttcagacttgttccagacggatcctcgggaccaaacaaagtcattgacatcctcgtacttggacttgtctccgctttatggcaacaaccagaaagaacaggatacagtcagaacattcaaggatggaaagttgaaacccgactgcttttccactaagcgggtcttgggattccctcccggcgtgggcgtgcttctcatcatgttcaaccgtttccacaactccgttgtcacgcagttggcagctataaatgaaggtggccgtttcacgaaaccggatgagtcaagtactcaagcttatgctacctgggataacgacctcttccagactgccagactggttacttgtggtctttatgttaacatcattctgaaggactatgttcgaactattctcaacgtcaaccgaactgacagtgtgtggagtttggatccccgtgcagagatacgggatggcttgcttggcgaggcacctgctcaggctaccggaaaccaagtatctgccgagttcaatcttgtttatcgctggcattcttgtgtctcggcccgggacgaaaaatggtcagaggatctgtataaagaattatttgatgggcaggatccgaaggagattagcatgcagcaattcacagggggtcttcgccaatgggaatcaaaactcccggcagatccccaagaacgtcctttcggcaaattacaacgccaagcagatggaacttttgatgataatgatctagtcaagattctccaggagagtattgaggaccctgccggggcctttggtgccttgaatgtgccggatgttttcaggaacattgaggttctcggcatcaagcaggcacgttcttggaatctggctaccttgaacgaattccgtcagtactttggtttggcttcttatcaaacctttgaagagatcaactcagacccattcgtcgcgaaccagcttaagcatttctatgaccaccccgaccttgtcgagctgtaccctggtctcattgtcgaagaggctaagcaggccatgaccccgggtagtggtctatgcaccaactttacgacctccagggccattctatcggatgcggttgctttggttcgtggcgatcgcttctatactgtcgatttcacaccgaaacatctcacaaactgggcattcaatgagatcaacaatgacgtctctgttgatggcggccaggtcttctacaaactgatcctgaaggcctttcccaatcatttccgtggtgactcggtttatgcacacttcccaatggttgtgcctgatgagaacaagaagattctgactagccttgataaggctaaaatctataactttgaccgaccattttacacggctccgccccgtttcatcaattcccactctgcttgcacaagaatcttgaaagaccaagaaggattcaaggtagtgtggggtgataagatccaattcttgatggagaacagcggccgtccttatggccgagactttgccttagcgggtgatctccctgccaatgaagcttctcgaaagatgcttggtgctgctcttcatcgtgaaaagtgggaatcagaagtaaaggccttctacgaggacattactctgaagctcctcgagcgaaactcattcaaggttgctggcgtcaatcaggtcgacatcgttcgcgatgttgctgttctcgcccaagttcacttctgtgccaatgtcttctccctgtctctcaagacagagtcaaacccaagaggcgtgttcagtgaacaggagttgtatcagatcctggccattatcttcgcttctattttctacgatgttgacgtgtccaagtctttccaactttgccagactgctcgtaatgtcgcacagaagctgggtgaactgacgctagccaacgttgaactcgttgctaagactggattcatttccagtctggtcagccgtctacaccgccatgatattttgagcgattatggcgtccacatgatccaacgcttactcgacagcaaattgccggtcaaggacgttgtgtggtcgcacattcttcccacggccggtgcattggttgccaatcaaggccagcttttctcccaatgcattgactattacctctccgaagaagcggctgagcatctggttgaaatacagcgcttgtctagggaggacactcctgaggctgacgagcttcttgtgcgatagtaagtttcttcatattccattacaatttaagaggccatactaactgtctacagcttcatggaaggagcaagactccgatgctcggtagcattgccacgatttgtcactaagccaacggtggtcgaagataacggtgagaaggtcactttgaaagctggccaggagatcatttgtaatttggtaagttctttgagtcctttgtctcttggtattcagatgttaacagagtacgaaatataggttgttgcaggccgtgatcctgttgcgttccccgatcccgacaaggtccgtctggaccgtgatatgagtctgtacgcccactttggcttcggtccccatgaatgcctgggtgttaaaatgtgccctcttgcactttccactatgctcaaggttcttggacgactggataatgtccgtcgcgcccctggtctccaaggccatctgaagaggcttgacggactgggaggaatcgccatgtatatggattccgagcacagtagcttctctccgttccccatgacaatgaaaattcaatgggacggagacctgcctgccaggaaggagtaaatgcatacgtgagagcttcaaaggatgtgaatcttgtttgagagatctctataatatttgcggctggttgtttgtatagcatgcatgcgttttcttagggatgtggttcaccgcatatcaataagtttgtagcaggcttttactctgaactcccacattttttcaaaaatagttgagagattgtggtcaagcatatttcatggtatctctccgtatgtaagataaaatgcaataattccagggttgcatgatatttgtgccgacaaactggaagtaaagacaggcagtcgatgcctgaggcctagcggggggaaatgcagagagccgctccgcccttctgccttttgccggcaagaccagcttctcttcacattgcgtccttctcttctcttctatcaaccttccgccctccttcatcttttccctttgacatatccatcttaatagctccacgtcaaaccttgagggataacgacctgcacccgttttcccttatttgaccgacttgcgatatctcatctctcagctatcgatttgagctttctcacccaagtaccttcacgattggatggtaaattcgatctagcatcgcttcgaattgccttttattgatcgtgaaatattactcaggtccccatcacgttgaatcgattcgattttcgttgaggcagcaaaaaagcatcaaaaacgtcataaggcatcttcgcgctctctccgcgacaccggtctttacgaccttttcaccccaccctctctaggagacaaccctcctggaatctctcaactccctcatgtttgactggtcaatcggtcgttaccatggggagaattaagaaggtcgccagccaaaagcatgaggctacaatcgtaagttactccccgacagcctgatgtgcaacccaactaaaatttttttccttccatcacagtcaccatttttgcaagaattcatagcgcatgccacaagtattcccgttccagagctcccgtcgcttctcaacacattccctaagctatggccgttcccgcgcggtgatctctaccattggatcaatgtcttggaccgattcgacgagattctggcctcagctgtggacaaatacctcctgaatactggccctcagacccaactgtttgcccgaagtgttttggaggaatcatattcggccgatgagagcaagaagccagcagagggtgttgatgctaaactaaatgccctgggatacggccctgaaggagatagagagcttgtggaagcagttcttgatttttctcgccttttgctcgagaaatgtgggaaccgaagcctgtacagcagcagcgatcgcctaggtgacctgttgaacaccacctcactttctctcctacaatctacattgcggctgtctctttgcttagctcaacgataccactctcgccagcgtggcacccatcaacagtccgtattgcagtcacactatgcgcttgatctcgaaaagttgcagaaaattgcggctcctttcccgcgtccagccatcgccagtaaaacaccgtttggcacgtcttcccccgttttaaccaagggaaaggaaatcacagccaagacgaaagtcaacgccaatgaactggtttccctcgtgcgtgatgacgatggctgggaggaatggggagatgttcgagtcctgtactatccctcaggctctgaacaggccagaactacgtccgaatttggccaaacagagcacggctcacacgttccagctacgccaactccattgcgacgtagcgcacaccccactcctcattccaaccaggcctcgaatggagatgaatcaccagctgttatcggtgggaaggcagaagaggctacacgagcgggtaaagtcctagagcttccctattcaaaagtttcaaccgcaaaggtggaagatcttcttgcggcgaacttgcctcatctgccccttgaatcaaaatatgagctgcttcacaagctccgagtcgccaaggcgttgacaacgtcgcgtgctacgcgcgaacagattctttccatcaaggcactggcagtgacaaatctggcccatgttcagccggagagtaccttccaagcaaaggtccttcaatctgacatggaacaaccgaagcgtcttcagcttacttaccagctcgctgaagtggttcatctcggtgccagtggtgacctcgcggtctctcggtctgttcaaactttggcgatccaggcgttggatgctttggccaagcacaaggttcgtgctatcgacgtctgtgcagctttgagcgtcaatgtcaaccacggaattctcatgttcttgacccgtaaaatggtcaatgaactaggccctgaaaacaacgacccggatgatgcttactacgatgagtggcgagatgcgttgcttgcactcctacgcactctcccaagctcgagcacacgtactccggagaccttggttgcagcaggtctgattcccatgtttgttgacatcttgaaactgcggactgaaaaatcccgccgagtctattcccgtatcatggagttccttgacacatttgtgcacgcggtccgtgatgcactgggtacattgacaacagcgaagggttttgacgccatgtctgatttgattgatcacgagaccaagaccgcgtttgagaaggtcaatcgaggggatggatttcctgctaaatacaaaaacccttcggttgactatcaaattccttactttcagcagcagactctgcgctggatgttccgtttcgtcaaccacatcatgcagcacaatggtggaggcttcgatcgtgttctgcgcaacttgatcgattcgcctcagctgttgacttctcttcgccttgtgttcgagaatgctcgtgtgttcggttcacatgtttggagcaacgccgtcaacattctcagcagcttcattcacaacgagcctacgagttatgctgtcatcgccgaggctggcctcagcaagagccttcttgctgcggtcatgggtcgtgaacttcacgttctggagaagccgccggccgtggaacctgaagaccgggagactgagaccgacaccgaggccgaaccctcggccactcaaccgcccagcgccgaagccgctattcagtccgagggaaagcaaaaggatcgcgagtatgccatcgtcagaccccagaacacccctctcgcacctggcataatgcccgcggctgatgctcttgcttgtatccctggcgcatttggagctatctgcttgaactcctccggtttggacctcttccagtcctccgatgcactagaaagtttcttcgagatcttcgagaaccccgagcatatcaagtgccttaaggatgacccagaactggttcgttcgttaggcacgacctttgatgagcttgtccgacaccacccagcattgaaaacctctatcatgtctgccgttcttgtaatggctgctcgtatcaacgttctggggcgagtcaaggcatgggagctaggtatgggcacaaaaatgtggacccaagacgccgacggcaaaacaactctttcaggagatgtcttttcattgttccgagagatcggcacagccgttgatgcacccatagacgaccctgcctcgtttggtgctccccagctcaactccaacactctgcctaacggcgctaagcttgtcgttggggatctagatcacgtcctcccttcgccgggccccaactttgagcctagagataaggatgatcatggcctttcggctacggactacctgttcccagctttgcgattcctgggcgctttcttcgagaaccagacgaactgcacatccttcatcctggccggcggcacagagttcttgttagacattgcaacactccaaagcttggcgtttgatttccacagcactaacgccaaccaagaggttaccgtgcttatccacatgctagcggaaacgaagcctcaccttgtggtcccatctcttgttcgacgcgcacaggcagcagtggacaatctttcagccttttggactgcgcccactggatcgggattcttcacagaattgatcaaaccagcagattcgaaaaaccctgctctcgagcctacggctgctgctaaatctggcacattcttcgtgagacatttgaatgctgttcttctccttaccgatgtccttcgcgaggttttcgcatcgccactgtaccaaacccggcctggtcagtctacctctatctttggccaagccaaccttgcggatcactactgttccctagtctcctcattgagcaaccttcttgcttcttgcgtgtgggaaggtattctcctagagaagaacatccccgagaagtggctgaaagcgacacaggcctctgctgaaaagcatggctctggaaagtcaaaggctgttccggttactgggaacctccaggagccttcagcaacacctggcgccgaacctcaacgtgagggcactagtgcatcagagacttctccagctcagtcgggccagggtccgaaagaagacgacaccgaagttgatgaacagtgtcctgctttcaagaatgcgcgtacgcttcgctaccttctaagcgctctgccaacctcgattacgggattcttgcacaacctcggactcgggattatcggcaagagacgcacagatccgctgcagaaacagaaagcgaatgcatttttggtctcagacgccattgctgaaggtgttcttcgccaactgcagttcgacccggccaattccagcaacagccccaagcatcgtttcgcatatctcattgtcatcctttcacacttctcgcaccttctttatgaagtctcttcagatcgtcccagtccgaactacttgacttcagttctcgtctcgttcaataaaaacaacggcctcaaagtattgaaagacatctgtgacgtcttcttgagtgatatcaagtcccttccatccgcggagtctattcccgaccaagacaaggagcttgctgaccggcttgcatccggatatggtggaattaaaatcattcttggattattcgcagacctcactgctgggaaattcatcgtggactctagccagacacaagccttgacttctcaccctgaccgggaccgcgaccgtcccgactacttccagccaggtcaactcttggtggatcttcgcatggagatcttgcccatggccagagacatgtggaactcggactttgcgacccagtcatcgagtccaattgtccgattgttgattgatatcatgcggttctccttggatggtgaatacgaggctggcgcggctcgtaaagcagataccccgcccgtcttggtagaggtgcccaagaaaccattcgtggtccacacggaacgagcaactgccttgcttgagaaagggtacacggatgttgatctcaataaagaagccctttatcgttgcaacaatcttttaacggcggctgaagaatactgcaaggcccagcagtggctacgagcccctcccagagtacccccgagtcctggcgatatcaaaaccggactacccgagtctgcttctggcatcgacctcctcgatgaccctggtcttggagaggttccacctttcaatactgccaattcgttagaccgctctggagccctccagttgattctagctcaggcgcaacgtcctcctttccccggaggcgatattgactccgacatgcaccgcaatttggccgaagctctggacaatgttctcaacgacaatgatgacatggatagcgatgatcgaggcgagtcatcgaatcagcgtcgacccgagagtcgtaatatcggggcaagctcttccgaatctaccgcgccccctcagggagaaccggtgaaacgtcgccatatggtcacaatcgaagatctggatgcagagaggcaaaacattcggtcaaacctgatcgatcgggctctggatattctaaatgaacatcatgatgtctctttcgagctgtctgacttgataacctcggctatcaagaagcacaacgagcctgtcaacttccgtcgagacattggagagactctcgttcaatcgctagtctctctacaaatggagaacttccagacagctggcaaaaagattgcagcttatgcccacattctcgcactgacccttcaagatcctgacatgtacctcgccactcttgaagagctcaaagattgcttctcgactttccttggatttatcaagctcccaacacctgaaaaggctgaccaagaaaccttcccttgggttggacacgtcctgctcattctcgagaagcttctgtctgatgattgccagcctccccagattgcctggaaactgccaagtcttgatgatcccaaccccagcggcgatgaaccagcccgtcttgaagatccacttgtctccctcgatgagaagacccagctatttgaagctcttgtcgagatcctccccagagtgggcaaggatgatacactcgcgctctccatgtgccgtgttcttgtcattctcacccgcgagcgcagcattgccgctcgctttggtgagaagcgaaaccttcagcgtttgttcgtgatggttaaacaactttctagcgctacaaacgataaacttcaaagtgccttcatgctgattcttcgtcacatcgtcgaagacgaagctactatccggcagatcatgaggagcgaaattgtggccaactttgagtccaagactacccgtcagatggacacgaacggctatgtacgacatatgtatcacctcgtgctgagagctcctgatatctttgtggaggttacaaatgaaaagctacggttgctccgatatgacaaccatcaacgtccacaggttcttggattgaaggccgacaaggatcggcagcaaaagcgaggaaggcccagtgtctttattgaagagccgaagccagaatcatcttcagcgggtgaagcatctgcccctgaaggcacggacaagggcaaggcccaaaccaagggtgccgaactcaaggccccaattgtggagaacccggatggtgtcattcattacctgctttcggagcttctgtcctacaaggatgtggacgacaaagaaaccagtcttgaatcctcagagcaggcagctgaccaatccgatactcaaactgatgttgagatggctgtggacgagccaacaccttcgatttcgagcactgccgaagcacaaacatcccgcggttccaagaaggcagaaaagccccaattcaaggcagatgaccatccgatttacatctaccgctgcttgctccttcagtgcctgacggaacttctttcctcttacaaccggactaaagtcgagttcatcaacttttcccgcaaggctgatcctctagccactacaccctccaaaccgcgctctggcgtcctcaactatttgctgaacgtgcttgttccccttggtaccatggatcatgatgagtctttggtgttcaaaaagcgcagtatcacctccacatggaccatgcaagtgcttgttgcgctttgcaccaagaccggtgaatttggtggtgttggtaaacgtcgtactgaccctaagtatgaggaggatgagcctgagcttgcttttgtccgccgctttgtgctagagcatgctctccggtcctacaaggatgctatggcctctactgaacccctagatgtcaagtattccaagctcatgtctcttgctgacctcttcgataaaatgctcagcggctactccttcaccaacgatacgggcttcccaacttcaaccaggcagctcgcgaagaccatgttcgaaaagaattttatcccggcgctcacttcttccgtcgccgatgtcgacttgaatttcccgtcctctagacgtgtcattaagtatattcttcgtccgttgaataaacttacccagactgccgtacttctcagcgagacctcggacatcactatccaaggtgataacgaggatgatgagatctcatcggcaacttccgtttctgacatggaagatgaacgcgaagaaacacctgacctcttccgccactccactctcggcatgctagagcctcgtcatgacgaggaagagagcagcaccgaagaatcggagggtgaggacgatgagatgtacgatgatgaatatgacgaagaaatggactacgacgaggatgtcgctgaagatgatggtgaagtcgttagcgacgaagacgacgatggcatgggtccaattgaaggtctttccggagatgcagtcgaagtcatccttgacgaagatgatgacgaggacgaggacgaagatgatgaagaccacgaccattcggacatgcatgatgacatgtatgatggagaaatcggtggtgacagagacaacgaaagcctcgaagatggcgcagaggacgaatgggaaagtgaagaaatgaccgaagacgaagaagaggtcgagatgatgaaccagtttgaagatgaaatggccgacatcagacaatcctctagacaccaaggtgaagatcaacatcttggtgacctattccgtgctctcaatggttccggtgttgatgatatccatggagatgctctaggtggtgatattcacgaagaaatcgatgacctcgatgaagatggtttgtccctccttagactgctgaggcaacaaatgccggcgcaaccaccagccttgctgacatccggtccagttgaagacgaagacgaaatggatgaacttgacgaggacatggatgatttcgatgaggaccaaggatcttatgaggatatggaaggtgagtccaactctctcgatgattttctcacagcattgctgactctcccagaagacgatgatcttcttgagccgtggggatgggaaggcgatgaacctccaatggcccgaggacatgcgcaatcccgcttccgcgcagccccaccaccggcctgggctaccgtcactgaaatcatgccgggtcgcccatccggtctcgttcccattcagccttaccaccgtgtccaccgaacccaaatcccgactcacggcaacgatgatggcactaatcctcttctcgtccggactgaccgcccagatcctactgttccacctcgggttgctgctgatgctttcgccgattggggccagtctatggaccctgcaggtggccgggttgttgccatggatagccccatcagcttcatgaatgccattatgcaagccattggcgggcaggcagcgccaggtttcggcgttgtcactcgccctgatggtattcacgtccatgtagaccgacgggcggtcttgcctggtcgtatccaagatatgctcgggattccccgaggagcaggccctccaactcgcactcgcggcgacgaccctcacacggccgtcaagtttggtcttggtaccaccagaaaccgctggcaagaagaggcccacattatcttcaacagccagtatattgagcggacccagcgcgtcgtcaactccattctgaggctcttggttccccctgccatcgaggaggaaaagcagcgccagaagctcgcggaagaggaacgcaagcgtgttcaagccgaaagggctgaaaaggaccgccaagatcgcattgccgctgaagaaaaacagcgcgagcttaagcaaaaggaggaggaagagaacgcccggctacaggcagagaaagaacagcaggaagccgagcgccaagctgcaggggttgatgagcccatggaagacgtccaagaaaccgatacggttgaagacgctggcccatctaatcaacccgaagcccaacccgctgaacccgctcgtcgagtctacacgaacatcaggggccgccaagttgatatcaccggtctcgagatcgattcagaatatctagaggctcttcctgaggaacttcgggaggaggtcatcatgcaacagcttgctgaacatcggtcccaggctgctgctgcgggtgaggaggatactgagataaaccaagaattccttgaggccttgcctgccgaaatccgcgaagaattgctacaacaagaagcggccgatcgacgccgacgggaacgtgagaccgcacgacgacaggcggccgctgctggtggtgctggtgctacgtctagcactcaaccggcggaagaaatggatgctgttagcttccttgccactctcgatccctctttgcgccaggctgttctcgccgatcagcccgaggatgttctcgcaaccttgggcccggattacttgaatgaagctcgtggtatgggcggtagcggccgacgcatggcccagtttggtgacatgagtgccattgatcaccgacagcctgctgcaggccaagagtcgaagaaagagcagagacgtcaaactgttcaaatgctcgacaaggctggcgttgcaacccttctccgtctaatgtttatgcctcttcagggcaacgctcgccatcaattgaatgatattcttcacaatgtttgcgagaaccgccagaaccggagtgaagtgctcagcgttcttctttcgatcttgcaagatggcagcgtcgattctacggcgatcgaacgcagcttttctcatctttctctgcgtgcaaaggcaccaggagcacaaaagacgcctcagtctaagcgatccctcgctatccagactgcctcgagcgtcagcagcgaagtgaccccgattatggtcatccaacaatgtatcgccgcgctgtctttcctctcgcagttcaacccacacattgcttggttcttcctaacggaacatgactctgcctcagctggtaaactcaaggcattgcgtaagggcaaaggcaaagataaccgagctaacaagttcgctctgaatgccctgctttctcttcttgaccgcaagttgataatggagagccctaattgcatggagcaggtgtctagcctcctgagtagtatcacacagccattgactgttctccttcgtcgtgagaaggagcgacaggaagaggacaagggcaagaagcctgagcgacctcaaatcgaagcatctgccgaacctgctgaggctgctgactccagtatggacacatccatgacggatgctccgcttcccactgtggaaacttccgaagtccctagtgaagagaccgcagagggtgaagaggctacttcagctgaagccaagaaacctgaagattccaaggagcccacaggagacgggaagcgcaagaagcgaaccatcgagcctcctgtcgttccggatcacaacttccgattagttgtccacatccttgcggctcgtgagtgcaatggcaagatattccgcgatacactttccaccatcaacaatctttccgctattcccggagctagagatgtgatcggcaatgaattggttgctcaagcgcaggccctcagcgataccatcctgggtgatttggaggatcttctccctcatatccaccaggccaaaactggtaccgacatgcaaggccttgctctggccaagttctccccggctagctcagaccaggcgaaattgttacgtatcctgaccgcacttgattatctgtttgaccaagcacgagcggacaagtccaaggatatcgagcctagatccgctccaaaggaagatgtgctcaaaaaactctatgaaagcgccactttcggcccgctttggagcaaattgagcgactgcttgactgtcattcggcagaaagagaatatgctgaacgtggctactattctcctccctctcattgaggcattgatggttgtttgcaagaacaccacgctgaaggaccagccgctatctcgcggcagccgcgaattgtcagtcaacagcaccccagccgatgctggtctcagcatggaaaacatattcttcaagttcacagaagagcatcgcaagattctcaatgagcttgtccgccagaacccccgcctgatgagcggcacattctctctgttggtcaagaaccccaaggtcttggaattcgataacaagcgcaactacttcactcgtcgtgtccactcccgcggcgccgagcctcgccaccctcatcctccccttcagctctctgtgcgcagagctgaggttttccttgactctttcaagtcattgtactttaagagcgcggatgagttgaagtatggcaaattgaatgtacgattccatggcgaggagggtgtcgatgctggtggtgtcaccagagaatggttccaggttcttgcgcgtggcatgttcaaccccaactacgctctgttcatccctgtcgccgctgatcggaccacattccaccccaatcgcctcagtggggtcaactcggagcatctgatgttcttcaagttcatcgggcgcatcatcggtaaggccttgtacgaaggtcgtgtactcgactgtcacttcagccgagcagtctacaagaatatcctcggacgatccgtgtctattaaggatatggaaacactcgacctggactactacaaatcacttctgtggatgctggagaacgacattactgatatcatcaccgaaaccttttccattgaaaccgatgactttggcgagaagcaggtcatcgacctgaagcccggtggtcatgacatccccgttacacaggagaacaaggaagagtacgttcagcgcgtggtcgaatatcgcctcgtcgagtcggttcgcgaacaactggacaacttcctcaagggtttccacgaaatcattcctcccgagttgatttccattttcaacgagcaagagctggaacttttgatttctggtcttcctgagattgatgtggacgagtggaagaacaacaccgagtatcacaactactccgcgtcctcttcgcaaatccagtggttctggcgtgccgtccgctcgttcgacaaggaggagcgtgccaagctgttgcagttcgtcactggaaccagtaaggttcctctcaatggcttcaaggaacttgagggtatgaacggtgtgagcaagttcaacatccatcgcgactatggccataaggatcgccttcccagctcgcatacctgcttcaaccgtaagtttttctccgcatttcttgattacattagcgcattttactaactatcttaacagagcttgatcttcctgagtatgaaagttatgaagatctccgtcaacgcctttacacggccgtcacggctggaagtgagtacttcggatttgcctagactgctgtcctgttctacggtatgggaatggttttatcaagccaaagcattgcacggcgtttctctcggttcttacgagattttctttttatggggacgaatgcggaaagtggccagcgagaagtttctttatgagaagatgaaaactgaggcaagtggtaaggaattcggttgaagtgcaggtcaaccgtgttttttccagcgccctctctatgtacttagattgctgcatctatttcttttacttcaaatcggccgcgcactaatccgtactttactggccattgtgagtagaacttcagggcttccagggcttgctgatgtcatcaggcggtcagcccgtcacgggactacgtagaaaaaaagacatgcggggccgcggaggaaaaacgattttttgagccgaacacggtcatcttggagaagagtgtgttttgtgcatcttggattgaatatctcttctttaactgtttcacagagccctacatcatgtcgaccaactccattaagctcttgactggcaacagtcacccggagcttgccaacctagttgctgaccggtatgtgcaaccggctagggcaaaactgggcaaccggctaattctagaactatgaattaggctcggcattgagttgaccaagattatggtcctgcaatattccaaccaggaaaccagtgtcacaatcggagagagtgtccgggacgaagatggtaagaacatcccaccttaatcgtgatatcaagaacccccgctcatatatatatgatttgttacagtcttcattctccaatcgacaaaacccaatgatatcaacgatggacttatggagctcctgatcatgatcaacgcctgcaagaccgcctcggcccgccgtatcacagccgtcattcccaacttcccttatgcccgccaagataagaaggacaagagccgtgctcccatcaccgccaagctgatggccaacatgctccagaccgccggctgcaaccacgtcatcaccatggacctgcacgccagccagatccagggcttcttcaacgtccccgtcgacaacctgtacgccgagcctagcatgctcaagtatatccgcgagaacctcgatgtcagcaactgtgtcatcgtcagtccggatgctggcggtgccaagcggtaagccatgtctatctcgatactacacgtatatgtatagttcaagggctaatgtggatttagtgctactgccattgccgatcgcctggatctgcaattcgcacttattcacaaggaacgtgcccgccccaatgaggtctcgcgcatggtccttgtcggtaacgtcaaggataaggtcgctatcatcgtcgatgatatggccgacacctgcgggacgctcgtcaaggctgcccaaaccgtcatgcagcacggtgccaccgaagtcaacgccatcgttgtccacggtattctgtccggcaaggctattgagaacctgaacggtagctgcctcaagcggtatgtatacgtccgaatgccatcgacgagtcattgcactcttggatggtttccgatttttcggttcacttttggctaactctctactcgcagcattatcgtcagcaacactgtcccattgggcgacaagcaagagcagtgcgacaagatccatacgatcgatatcagcccaacattggcagaggcttgccgtcgtacacacaacggcgagtcagttagcttcttgttctcgcacaccgtggggtaaatcagaggcagaaatgaatttatacatcaagacagaggatcaaatctacgggttgtcctagtgattacctacgaatgttggcgtgaaacccgcggagtgagcgggaaacaaaaaaatacgattttcatgacctttattagccggacgaggatgttagtccccgggtgttttattattgtttactatacttttcttttgaagagagatcgacggttaagtgttggatctgcgcagttctctctggcggaagttggttatccttggctgggtttggttgcatcgtgcatgtatgtggtcttgatatgcagagtacatgtactttctatttggtttagattattgcaaggtctgggggccgctttacaacttgaattagatcgtcttttcttactaaggaggtgctgctatgactatgttgactgcatcggtgtagtcttaatatgttgttgatccaacgatatatataggtttataacaggggttcattactggtcgtggaggtgaagccggaacttttcccatccctatcttctccaaatacgtaccattgaccgcaaagtgcagtcatatcttgaaaaatataattccaaacgcctttcgatatcatagacttataccacgtgacctatacctaaacatgactttgggggaattgtaactggcagtggggaatttaaggtaatgacttgattgaactggtgttttaagtcacttcattgacacttcattcaagtggagtagaagagtccacagagaggaatacaatatgctacgcctactccttgaaaaagccatgagcaattgacagaactgagtattgaaatttgcatgcactccattcaaaaaaaaagggtcatcaaaaaaaggtaggttcaacacagatatgcattgcgactcccaaggcccgaaatcaccgtagccaaacacaagggagtatcaaccactcagcctgctttgtacgttttgagacctgttccccgtcacttttcttgttcccatttcttttttatcagacatgtatcctccgcgcccctgagagtgattcattttttatgaattcccctcaaatcatcccagagacgtgaagctcctccattaaaccccatcgccgcagaacgaaatcataaaaccgcgggtttggaagtttacttccgcatggaagaagctctccgcttgcggagctcatcacgcttggccttctcctcgtggacacggccggcaaggagtttagcgtagtcgttactatgtaaccgttagttcgagttccaaatcacatcaacactcataaatcattgatcagagcgaaatagagggagtcttacgcagcatcacgggcagtctcagcacggcggcgcttgatggcaacgcgttggcgcttgcgctggagacgctggggggtaaccagacgctggatcttgggggccttggtgtaatccttcttgccctccttggtgacggtacggcggatgacgaacttgcggacgtcgtccttcttgtcgagaccgaagaagcgacggatcttggtggcacgcttggggccgagacgcttggggacaacggtgtcggtgaggccggggagctcgccctcgccctgcttgacgatggaaagagcaaggacggcaaggtccagaccggtgatggcaccacggacggacttgcgcttgcgctcaccggtgcggcggggacggtagcagctgtggccgtcggcaaggagcagacgggtacgggtggggaggagaactgtagaaatcattcgatgagcatcctgcggtttgttgatatccctgggggttggatataatttttttgatcattccccaggttgttgtgcggctgtgtacgtaccaccctgcttcatggggaaacctgtaaattaatcgtcagcattgtggttctcgttatgtgcgttggattgtattctccattatcgaaatgttgctccgacattgggaatagagattgtatgcgtaccctgcttgtcgttaccaccggtaatcttgaacacgtaaccgttgaactcgtcaccgagagcatcgccggcaacctaatcaaaagagataccagttagccagttgttctaatagtcgtgtgtgtgcgtatgttgttcatcgattgaatgtcggataggcggggaaggatgaagaagggagtgctgacttcggtgcccatgcgcttctccatgaagggacggagcttgcgctcatcatcgatctcgataattttctgggacccattggccgggtaggagatgttgagcttcatcttgacggaggcggcgcggtcaagacggtagcgcgggtgttgtcgatttgtgagattgtcgtcgagggagtctgtattgtggatttttttagttcgccggcttagcgaggtgcaagtcacgtgtcacgtgtgggaagtagggcttacgtcggccagatggggtttagcgtggcttggtaagtcatgtgactctgcatcagcaccccgacattttcttttcttcgtccgactcaacaaatctacggcgctggcccctaaaataattgatactttcagcgataaatataagactcaatccgacaactatgcatccaggcaacaacacatatcgaggaccgccagcaactacagtttacctccgccttgaaccgacacagtctcctttacctttaccctggcatgaaacctcccagtgtgactttcgaacacaactgactttgaatcaccatcggaatgatgaacgaaatgttcggatcatgactcagtctcgactggccgaactcaacttttatacatatcaaagactgagcacggtctcacaaacgcctcattgacagccaccacgagcctcgtacgacaattgcaaataacagcctccactaactatatttgaggacctttgatgtgaacccgcatgtcagacactgcaaacgccagtgcataacctctggatttgtaagacactatctcatggatagatggattagtcctgggattcagaaatccgatccattgggctcaaatccatattagggacgtttgaaggtgatattcaagatagccccacgacgtgtttttggatatgttttagatgtctctccccttcatagtgtcatagtcagataaaaaataattagtaggtcagtcctcgtacctttcctccatactttattctcttccatgcatcatttcccaataaaaacgttgtgtcacaaactccgctctagagatctgcagtatataatgtcttggcatgtctcataccgagaaacaattgcatgtccgacgggcaaagagttcaaaggaacgccaaatctcttgagacaatgcgaaacagaacctggacgtggccttgtgccgggctttgtatgcgatgcgagtactccgtaagtctagacctgatctccactattcggaactgaagaattgcgaaagggacaggagaacccaaatatcaccgagaagcttgctgaatccgtatacggaagaaaataccagatcaagcaattgtggctctaaatcggcgactctgatttgtccagtcggacgttagtcgactcggctctccgagccacgcggccaacctacaagtgtgacgaattcgcgcctcacgtagggattctggttttttttgggaattaggtcttctgcttgctagtcctagcttataatatagacacttccgtcctgtttctatcttctttccattttcccctagcgtttctggaggaaccgccacatacccgactttgccggtgctccttgtccgagtgggggatttcgtcgcaatctccaatttttttgcagtgccggataatctcctggttccccgcacaatcggtgagacattcgttcctgattatcttgtctcacattgcttctgggggattgctatatactttgggagcatttgtggcgacttcatctccgaaacaagcggacgacgtgaggtccaagctcgacattgctcgacattgctcaaggggcatattctggctgtggccgttcagtcgccatgacgcgccttttcaaccgtttctacgcgctggctgctgtcgcagtctgcatgattttcacatcggcgtggtttttgacgtcacggaggttctccgatatcgtcgtccctttggtctcagaaccgttccaagtagccagcacattcgaccagcgattagtggtattcggcgactcatggagcgacaacaaatccgacgaggcgcagggcaggatttggacggaccggctttgttcaatggtaagataaccacccgagagattaaaggagaaacaagcgtgtctgacagaacctgaaacacgattagttctcctgccaccaagagaacctagcacagacagccagtccaggcaagaacatcggcgcggtggtcgacaactcagaactcgaccatctagaccgactgtctcagacccacatcgccgacttcaagtcgcagctccggcaatggctagacgccgagtccgtcgcgatgaaggatcttcccgaggaagaggtgcggtcccggcaggaccgcacgatcttcgtcgtctcgttcggggtgtgggatctctggagcctggttacaaaggactacgacgtagcaagcaaatcggttgagcggcgcattgcaacgcttatgagccagctcgacacactgtccgatcgctggggcaccacggacctgaaggttattctgacgcagccggtcgacgtgactttcctgcccgggtttaactcggcgggggatcagtacaaggatacggtgcggatcctggacgagtggaatgggaagctgcgggaggtggctcgggagtggagtcagggcactatctatctgtttgatacgaatgcttttatgatggaccgcattcgtgactggcagctctatgcggccggcattgaggaagagaatggtctaggcaagaacctggttcctgggtgggagaatgtcgtggagccttgtgtcgagagtgggttccaggtcatgatgtcaaaggagaagaaacagtgtgaagatccagagaggtatctgttctggtgagtggttttcttttcgtcattccctatcagttgtgtatgaaatgtggttggggaagggatcgacatgtccaatgccttttttgctgactgtgacattgatgatttcaggaacgacatgcatttgggtccttcagcacaccggctcatggcggcggagatttaccatgggattgatgggattatgttgaacccgaatgggaccgagaagcgccacaaccggcggtttgcagcttagacattgtccagatgaataaagattcaaacatccaagacattcaaaaccttcaaaatgagacaaacaactcaaaaatgagaaaagaaagaaaaggaaaaagaaaagatcggtgacgtctggccgggggggttgtatagccatgatgtcggtacccgcgaagtcaaacgcagaaactatacttgatgcgggtgagccatggccaggttcctggacaatcaaagtgtgtgcggtggatctgaacccttggacatccaaagggcacggtagtaccgatggtcaaactggaacctggaacctgcagaaggggttattgaaacacgggaagatccagaccgatatccattacccgagacaagagggaaataggggggaagggtggtattgttcgaagcccacaagtgacagtgactgtaacgtgcagtggatcgcgagatcggcaatgagatcatcccagatcccggcagtctgatggtaatttgcaattacgggagatttgaagaataactgttttatgaattgaacagctgacaaggacaatcaagctcgaagtctaaaaaggcgaaattaattgtttcactgatttccagaaataagaaagaaataagaaacaaataagaaataacccaatttgttctctttgtctgatttgccggggaactgatttaggacataccccgaccaatcatgggccggataataagttgggtggaccatagtggaccctcgtgggccagctcgatcaagcgggtcgccgcatccggagacaaagaaaacaatgactctagtggtcttggccagggaaagagagggaaataggggatttcttggggagttgggagttgacacatcgattttggtctctttcggtttcttttggtttttttcttttttcttttcttttcttttcttttctttttctcttcttttcgtttcggtctctggttgggcctaatcggaaggtaccgtgtcgttgggagtatagaaatcgagatcccccaagtctccctatagcgaatataacaaagaaaagccgcgattaatcctcttttcgtacttttattttaatttctttttctctcggttggctcggtcagaatcccaaggcccaggagctattgtcaaagaaccaggcgctagacagggattccgggggggaacacccaacaagacaaagaaaaaccgcttttagggcttttgtgtccaaacgcccatatacttcgctttgtgctgatccctgatattccccggtctttcacgcattgcttattgggattatttcccatttttcctcccgaacggattcattttctttgttgccgtcggtccccatctctttcctttcttgttatttcttggggcccaatcgcccccaaacctattcccttctgccttctctttcaaagccgtatatacactttttttcctcctacctttcccttgtgaccaatctttctttgatcctcatcttcgccttcgagccagttcattcagagaaaagtattaaataaatgtcttacgatcgagttctccccaaccctgttgctctacgatatgagtctgcccaagtctcgctgcctagaccgagcaatttactcgatcacaaagtcatgaacgaagaattgcccaagtcggttatggccatgagacaccccgacggcgcagtcagatatgccgatccgaggtcaacggggatacatcagacacatcagcatatctccaaagaagcacaccggatgtcctccaatgggcccggcaagcctgtcgggcccatgatctctaccaaggaattgccattgcgagagagatcggatcgatcctcctcctcgtcagctagcagtaccagtcctgtcaaatcacacaaagagagtgccctgcagttctgcctctgtcagccggatccgaagattccccggcctcgtaatggtgagtcgatactgtccgcaccgtcattacagtttggcaagtgctttttcgattgtttcttttttggtcgtcgtcagccagatcggatctttcgaacgcatggacatggctaatattggtctagcgtttattctgtatcgccagcattatcaggccatggttgttgctcataacccgggcttggccaatcctgagatctccaagattattggagagcagtggcgttctctttcggaggaggacaagagtaaatggaaggcacttgcagaggtatgaaagcaatcccagagatatggattcaaacactgacattacaccaggaggaaaaagctcgccatcagcagcaatatcctgactaccgctaccagcctcggcggtatggtcgggatggaagcgcccgaagctcggccacaggaattgggcacaatccgtctggttcatcacattgtaacagatgtggtggtcgattgatgaatgcacccgcttcccccatgaccccgttcacacccagcagtgggcctggctttcgaccatcaaacttctcaccacacccaagtagcatgccgccaagaagcgtccaaggccgtgagaaagaccctagtccaccaaagtcggccaagatggaccacgatccccgctctcgccaacgacactgggaggaacccggtggtcgatctcctgacaacaaacgccgccgagtatcccaggcctcattcaagccaactttacatccctaccgggaccacagtcctggcaacggcgttccagagtcaccgcatccgatgaccccttggagtgctcgcccggagatgccaccacgccatctccccatgcttcaaccgcaacgaccatatcaaagcgtccagggacagtcacaccccgaccccagtctgaagctaccgccactccagaccacaacaccggtgatgactcccatgacaccctatccacaagaaggttccagtgtcgaagcaacagtcatgacaatcccattcctcaacaagatcaaagtcctcgccaaaatctccccacccctcctcccctcattccgggacggaatcccaccagcccgcggccccgtcatcgccgtcgacggccaagacccagacctcgtccaagcagccgtcgaatacctcaacaacctcctaaaaaaggaaacaaagtaccacgtacgggtattcgacggcccagaaatcaaagccccccgaccaacctccgcagaagccggccagatgggcgacgcgacagtcgactacctcaacaccatctccgcctggcaccggatctccgacgaagtcgtcaacttcgtgaaacccacctcgcgagccggctccgtcgacgcccgctccataaccacagacgaggaaacccccgtccccaacgtctccccccgcaccctcatccccaaaaccgcaaacatgcacatccactccccagtcctgtccagcgagaacggctccgaggtcagcgccctcacatcagccagccactacagcgtaccgattgcgctcgtcccgcgctaccagctcacgacggcggatgcattcgcctgctccacgcccatcggcgactcctacgcgccgctcgaccactggcagtggatggcgtcgctgtggcgcgcgtgtgtgggccctgatatcacggtttacattcgggagtgcagcaaggaggagcttgatcgcatgggtgggaatccggttgaggtgcgattgcaggatgtgcgcacggtggtgctacggaaggttgctgggagggatttggaggagaaggcgttgaagcggatgggttttgagattgaggattttttgacgcagtaagcttagcctgcttgggctgggctatagaatgtgatttggtgcattaggattgggttcattggttggggcatgtgatagatgggatcgtggtaatttgatgatggctcatcatgtttctaatacaatattactagtgaacagtgaacagtgaactgtataatgaggttaaaataacaatcgacgtgacatgtaaggtcctaagaagccagcgctcgggccctcttggtccaccgaaagttggagtctctgggtcccgaggcggagccgcttatccaaggcggtcaccattatgtatgcctatctccgcattttattttatccatgcatgttgtcttcctacaactattcaccatgtcggacctgtcccaactgggcccagagcgctggaacaggtcgccaatactaataagctctgaaccttctggtcttccttttatcccccctgccagtcctcctcccgatgtgaaattcgagatcgcagagatagatgagccgctcaacccattcgtcccagagccagatgagccccttgacccagaggtggatcggtcatctctaaatcgaggggaacatcttccacctctgggtagagagggctatctgcctctagatcccgaggttcatttgtcgcctctcgacccccgcaccccaaaggcaaatacgcatttcgataactatatcccagccggcgttttgggcaaaacccgctccacgtcccgctacccagactgcgagattagactgctggaaacacatgaatggatccgcacacgctttcttgtcgacagcagaaatgtacagattttcgtgctaccaagggcagagaaagtccgggatcaatctggaaagactctcaaattcaaggctctcagatacgctctcaaaaccgtcatgtccatggtcgatagctcctctgaagcatggaacggcttggttgatgcccgttttgatctacttgccaacagtcaacctgacagcgaagaagaatcactatattacatatacaatacgctgcaagaacccaaaccagacttggaccaagtaacagatccgatctcgtggcgtgttatggatgaattacttaccaattcggttcgaaatcttaaaacatcacttcatccgtttcagcgcgagtctgctgctttcatgattcagcgggaggtacagccggccctggcgcttgatccgagattccagcctttacggggtccgaccgggttggagttttattataataaggagtctgggagcattttgcgtgataagatattgtatcccgaggcctgtggaggtaatttttgccactaatctctcaatgatggtggtcaaatatcttgtgaactatactgactagtactagggatattggcagagtccatgggatgcgggaaaacactcatcagtcttgctgtgatattggctacacggggacatttccccaaaatcccggtggagtatcaaaaactcgagaaccccgtcaggcaaaagactggaacattattgcaaatgactgctgctgctgctgggcgcttttctctgccctggaaggagtacattgaccagaagagagcctgtgggcaatatctcattaattgtgagaaggcctgcgagacctaccgtggttcctatattatccccgcaaaagagaacgcaagatctagatcaatgtacgtccaattgcccgaggaaattcgtctctcctctggtacagtcgttattgtcccggacaacttggtggaccactgggaacgcgagatcgctactcacactagcaatctgaatgtcctggtactgcgaaatagtacccctgaaacaccgtcagcggacgaacttctagaatttgatattgtgttgttaactaaagcccgatgcgttagagagaatccaagccgtggaaagaggccagattctcctcttttcaatcttcactggttgcgagttattgtcgatgaagggcatgacctttccagtcgagtgacgaatttgtcccacttgctaggcaaactgaaattcgagcgccgctggatgatttcgggaacccctctttcggaattgtatggagtggaactgagcattgcatcgcgggaagtgaacatagacgatcctgtatcgtcggacgaagacgcatccttgcagtttcacaaaaagacgggcaatgccgtcgatactgaaatcaaaaatgtgagtaaattgggtgatatggttcattatttcttcaacctcaagccttgggccaacaatcccgaagattggctacgttatacaagagcggtgggtgaagatggcattcgtcgaaaatctccttctctacgtgcgatccttcagggtcttgttgtgcgacaccggtacgaaaccgtcaaaaaagagatcactcttccaccgctgtacaacaaggtcatctacctggagccgaccttctacgaccggctctatatcaacatgttcctcttcacactcgcagtcaacgccattacatctgaacgtgaaggtcccgactatatgttcaatgggaagaagacagggaaaaagaatagactgatggagttgatacaaaacttacgtcttgctggattttggtgggctggtgatgacaatgtccaaagtactgttgacattgctctggaatatctgcagaacaacgaagagaagatgacagcggcagatgtcaaccaattaaaacaaggtatcgagatcgcacgaaaggcaattaactccactggctggaatgggttcaaaaatatgcatgagcttggcgtctttgttcgaaatttcccagagaatgctcgcaacatgtgggctcttgatcctacagacgccgaccgcgagcccctgctcatgggtatgacgcaggcccttcgcgcgcaacaattcgtgatgaaaaatatgggcaggatcgatcccactgcaggtttcgcaggagagggtatcaaagttcgccaggggctgcttaagcaccagacggctcgttctgcttacagtggtgcccaggggccgatgaatccaaaggaatcaaccccgccaaaaagaaagggtaaacaaagttttgagaagaatctcccacagacttttgaacaaacaaagctggaaggagtagcatcggccaagcttcggtacttgctagagcaagtgctggagttccagaagaccgagaaaatcatcatcttttacgagcacgacaacgttgcctcctgggtcgagcaaggcctacagttaataggcgtcaaattccgcacctacgctagcgccgtgagcatgggctacaacaccaaatccgagaatctggccgcattccgccaaaccgacgaggtccgcgttctactaatgaacgtcaaacaagccgcgcacggcctgcacatcccagaagcctcacggatgtacatcgtcaacccaatctgggaacgcaacgtagaaagtcaagccatcaaacgcgcgcaccgaatcggtcagaaaagacccgtctacgtcgaaacgctcgtcctaggcaacaccctcgaacatcgaatgctccaccgcagcaaaaacatgacttccgaggagaccaagaacgcaggaaagaacccggtggacgacaagaccatgagcgagatcatccaaaacgagcccttcctacccatgcccgacgacgaggcctcggccggcatggctccgctggcacaaccgatcgtgctcttcgagcccgataacgtggtccgtgcgcccgggccaccgcgctcgagaccgctaagatcggccccgtcgccgtggaacccgccgcggggcgtagagcccaatgccgattccaattcggtcgatgttcaggggcaaccaccgcccaagcggccacgctttgcggagcaaagtcaggtgataagtgtgggtgaggctcctgcgccgcagcagcccgtgctcggggttaattcggcttctggggctggggttgctgtgtggccttggccgactagcgttgcgaatcctgcggcggttaactgggatggttttggagcgtctgatccggtgcaatttgtaccgatgggctctgtggtagattcgacggggaacggggttgatacgcgagcctccttgttcgggccgttcgggccgtgatgtgatatgtgtcattgtactttacgttctagcgctgttttttgctccatacccatttagttatagaatatcagcttattcaagtcaagagaaaagaattagttcatgccaagtacaatggagcagactaagggggtctacgagtaggatgtatcgcaaacaatgggattcggtctacttgaattttataggctactccaagacgtgatgatcaaagttatgcagagaaagtcgtctgcacaatttgagcttctgcgcgccttttactaccgtcgagctatgaaaatgagaaaggacgagaagatatctaaaaaaagacacggcaagacaagaccgcataggctgactcctcgtgctactataaatagggaaataattactccacaagaacgacatatcaaaagcatggtatgatcaaaggtaaaaatatcttattagagctagctacctacgaactgctgcgacatgtcaccctcgaattcccctagtcaagacctaactttaaacaacatgccatccttcggccactagatcatcaatattatcactaagactaaaacaattcgccccatcaaagagatggaagaaacctgtaactccaccattatcgcagctaaatcggtgccccgcagatagcttcgttcatacccacttccaacataacattcctgaagattatgattgctattgccactgttcagaagaaattcgagtactaactaggcttctgaaacaaggtgaagctattattacttataccaagtgaactaaagcccccactttcaggctcagatacatacttgccatatcaagtagttatatattttcgtttaatatctagactttttgttaatctattatactattctagtaagcttgatactaaccgaatctagtgtaattgaactagtcttgtaatattctaatcgtttgataccccgccggtagcttcctaataacaaggtggcaaggtaaaatgggatgaaactggagaaaagatgtgctttcctgaccagccgagtcagtcgatagtggtgttcagaatgagtttaagctatcttcctaaagttgctgcttaaagcatatacatggagtcgagactcctatctccttccaagccatttgatgtagcaccctcagcaagaagcttcttcttcttcatatttctgcgcctaagcagataccagcatgctgtgtagaggagcccagcgacacacgtcaaaccagcagagaccgcattaccctggatatatcgaggcttttgtgtgctagggtatagttgcgatgataccatagaagaaatatcagccatggtatataccattggcatggaaattgcacgtttggaatccggcgcaaaggtattagttgcccaggtgacagcgagcgtagaaatcggatagaggcctacaccagggattagaaatgggtatcaagagacagagctgactagagcctgcttaccaaggacgagaataaacattcccgcgtagccagcgccggaagacgatgttcccacacaaatcaggtaaccgacagcaaccggaacacagcagcctatgatgaataggcttcgtcgcttgagcttatcagaaaagtagacctgtgtcaaaagagagatggcaccaaggacatagacaggaatggtcatatagttagcctggagggaggtgtatctaattcagtcagcaaggtgctcaaatatctcgttcgatataggtacttacccgaggccattgataatagaaggcaggaagacaccgaagccattgattgcgacagatgaagtgaagaaagctatgcccaggaagtaaacaaatggatctttcagtgattccctagcccacttccagtcaaactttgcttcacctcggagcacatagtctcgctccctcttcagacgcatagtctccttctcttcctcgttaagataccatgctgtttcggccgaatcagggatgaagatccaaccaattccaccaatgaatatagtaaagcagaactcaacaatgaatagccatctccaagcggcaaggcctcttcgagttcccatagtttgaattccataggcaaaaaggccaccaaaagcgccagcaatgcactgagcgaggttggttgtcatgatacgctttcctgcttgttctttagggtagattgtcgagtagacgaaagcaaatccgggagacagaccgccttcgcaggcgcacagaatcatacggacggcaatagcttgaccatatgtatggataaaggcagtgccgagggtgcagatactccacaagaggaatgcagtaccgagtgccttcctggcaccaaaacgtctaacaaccagggtccaagggagctcgccggcaaaactgcaaaagctggatagagtttggatattattgaattggttgcccacaagacctaagtcttgctcaaagccgaagataacagcatttccgatctagtgaatggttagacatgaatagtttgtcaccacaccaagaattcttacgttgtttcggtccagggcggacaggataataaagatgagggaaactggtacaaggtatttgtcgaattttcttcgtgcggctgcttctttctggggatcaatgtagatagttgagctagcctcattagaccgagccgcaatgctgacctcagtgtcgatgactgtggtctttgtatcttcagtctttatatcaaagtccattgggacggcttgtactggggataggttctgcaggaagtcagatgcctctggagggaagacgatcatgaacttccagtggcgtcactatatactccatgctcagatactcatactgccagttcaacgtatacgccggaagacatggacgattgttgtctcggtcatggtgatattcgataaatgctgacataatctgaaccttgatatctcgataagcttgaaaatgataagacgcgcgatcggacatagccgaatagagattatcgcaaccaccctggggtaagtcggctttctccgatggagcattcaaattcatattgccttcgtaacctaccatgaaaccccgtccaggccatgccagcagctattctccatatcatttgttgatcccgattctcatctagaatgtcgcaaatgcaatcgtcattgcctccggccgaaaggctagcgaaaggaaaaggagcaactgcttgtctgaggtaggtgacccaatatcgttcgtatggtagatgattcggggctaaactaattcttagatgtcgtcggagaaagcagaaggtagccatactgtttgccctcggccgacaatctgattgctgacaatttgttgaacagtgtgatttgaggcatccgagttgctccaactgcgaaggcgcaggtgtcccatgcatgacatatcactcacagaataaatccacggtgagtctttctaataagagctataatattaccgcacttaactgacatacttgaaggttcctcgtaactatgtgtcggagctagaggcagaggtcgagaagttgactcggcagaaccgcgaactgagagcacgagcccagtctgcttcggttaatgatgagatgactaccccacgcgacaacctctccccgggaagtctggccgcgtctgatgcaagttcaaatcatgtgcaaaacttggtgaagagcgtcagtgatgttgttgtcgagccgtcaaggcagccacgattcttaggacagagcggcggcatcacccttgccaagttggtcatatcagcaatccgcgtcgaggccttgacctctcccctgtttattgagccacgctcgtataatcattcgtcgtcctcgatggcagccgaggcttctcttccaccgcgtcatgctgcagaccacctggttgatgtctacttccagtaccaaacgccccatttacccattgtgaagcgttcaagagttgaggaggccatagaaagcgcataccaagccgcgagtggccgggaccttccggaccgagcagtagaaacggatattttcatgtcttttatgatcttcgctatcgccctctgtgacgtttcaaacccatctggaggtcgaccaagccagagtgaggggtgcttcaaatcagccctcagtttgtacgaaaaggtcgttacgagtttggaaagtgatatcgagactctgcgcactatccttctgttggctcaatttattgcattgtgcccttcccgagggagtctatggcatctgaccggtatcgctttacgcttatgtattgacataggcttacattgggaaagcgaagatcaggctacgagtgtggatcccgctgtattatacgatcaccgacgtctctggtactctacatatcaatttgaccgtatattatgcatcacgctcggtcggccctttggtatcatcgacgaaagcatgcgtgtgccacttccaaatccatgggctgtctatcaaggagcatctagcagcgaatccaccggatttgatatctacagccaacgagctcataaccacatgtttagcttatcgatgcttgagtctgagatcaaacatgtgcaacacagccaagtttgggctccgaaaatagcctaccctagggcaaactatgcagtgtggcttcaagatatccaaccccgtcttgaagaatggtacgccactattccgcagactaccaaggctcacccatcatccatatttgcatatcaggcgtattgggactatctatataacaacgcagttatcctgctttaccggcccaattctaccggatcacaaacctccccggaagcaacagtcctctcttttaaagcctcttgtcaacttataggaagtatcaaaaccctacaacgagaagggaaggttgatatactctggaaatcggcccatcatctctttatggctggcctgggggtgatatacagcctttggcagtcgaaagaagtgcgagaccggaatccgattgggagtagcatttccgcgctgcaatcctgcgcctcgacacttgctgcaatggctgagagcttcccgggggtctcaggctgccgtgatgcttttgatactctatcggaagcaacagtcgattggctagttaataataatgctgcggaactacaccatggccgtcaagagttcgagaaacaagcagaggacgtcctgcaccggctacagccttctcgcagagcacatgactgtaatggaatggatatgtcaggcatgttgtcggctgatagctttgttttcagcgagatgttcagtagtgctgctcaatggcctgagcctcagcacagcgggtttaatgacatgggctttgacccaattgcaagaggaggatctcatatttccttgtaatactttcttaggctagaaaatcgatctaatgaatagctatgactaacgacgtttcttccaatgtaatatacatcctttggcgaattacacttcgctttacatgacggtagcttcatgctcaagtagacgattcaagaattgtcttctaggtgatacgactgtttggactatgcagtaagttcgacctgtgcgtaatccattggactcacagagattggaggagcgatgcataattgcttctgtgtatcgagaacctctggagtaagtgttgcagtttccaggtaatacacgctccagggggcgtctccttgtgtgactatctgcatagcaattcacatcagggtggcccgctcgctcggaacttacgttatttagttaaccttcctctcatgcagaaataatgaccatgatcggagatttccgacggagatttggcgcttatatgctaatcagtataccaatcacagccagtaactttttcggagaaaagcgatgctgccctactactgtggagtagatagatagacagcttcgttgggaagagaatttgcagacatgtgatgactgtatcgctcctctttccaatctacataggcaaattacttgagtatatagctacccctaccagttgaataaggctctcttggccactattcttctatacggagaaaattcatcatggctactagggagtcaattaaactctttaccaatcgaaactgcccatgtatgctctccgagtccatttttgctgcagaatactgacaatgactcgcaggggcacaccgtgttcatattgtgctggcagagctgggtctaccattcgaggaggagatcattgactacagcaaacctaggcagcccgagtatctcaagatcaaccctcgtggacaagttcccacattgacatatggcgaccatatcatattcgagtcagcttttatcgcacagtttctagctgactcagtcacatcaacgcacttgactccacgcactggagaagcccaaggagccctcatacgccacagaatcgccttctttgtcgaaacatacttttcaaaggccaatatctactactaccgggcaatcgaagccaaaactgatgaggatgccgatgagctcggcaagcggtatgttgatgccgtcgtcaaagaggtcgagccactcttgcaagacgcgaaacccttctttggtggcagtgacaagctgactatggccgaggtaattactctccaacccttttgaaacttcgtgtttggttatttccccaggcaaccgagatttggaaaagctgaaacggcttgtaggttctgactgcttcctttatcctgcggatttccacgctgccgcataccgaaaatgcgccgttgccaaataccatggtagctggcatggaagaaaaggcgccaaaattcttcgcgtgggcccaggctgccatgaagcatccgtctgtgaacggtatctataacaaagacggttgtgcggccgagatgcgtgatcgacgagctaaagctcgtggtttggtatgattcaattgctgtttgtcttgaaaaggctgttctgcaaagttttgcaccagccaagatacagaaaagtgttctgtacaggctattccgccatcctgctatggattcaattaaaacaaatattgcagaaccaactgttaattctacactctgtccctaattaatttctttgatttgaaaaagtagaacacaccgcatcgctaggaaaagcaaaaatgtacctctgattggccacattcacttggaatacaagtggttttcagataaccaacatgttcccattgtcgaatttcgagcctcccagcactgattgaactttgggttttctttaatgagtacctcgttacgcagtacgtggaaaggggataaatatggatttcgcgcgatggtcttcagtgtcactgtgctaggaggattcatattcgttttagaagcgtattattcaatgttcacagctaggtgctttttatccccatgctagataaattcattggtatgtatacccatatcaacggcgttgagtcctttaaaatttcgagatgttgatctgaaccaggaactcaggtttgtgctgacctgaatgaatcgagttgaacagatttctacttcctacgggtctatatagcatgatagcatgtgagcagtatgacataaagaccaaatttcattgtaataccactatgctagaagcttctagcatagacacttgctcaaagaataaagaagcacaaagaagacattcgctgatcaaaggctgtacatggtgtcaaggctcatatcgccttcaagcccatttgtagtcgctccctcggcaagaagcttcgccttcttttgatttctgcgtttgagaagaacccagcatgaggcatacagaaatccagcaaccactgtcaaaccagcagagacagcgttgccagttatataccttgggccctgctgactggggtatagttgggaagaaaccagtgaagagagatttgctatagaatatgcgatgggcattccaattgcgcgcttggagtctggctggagattgatagatatccatgttacagcaagggtggaaattggatagagtcctagacaaagtttaggtttagacttcgagtaaacatctgcaacaggctagatcacacttacctaagacgagaatgaacattcctgtataaccagcagcaccacttgctgaaccgacacagataagatatccaattacgactggaacacagcatccgatgataaaaacaccccgtcggctgattctgtcagaaaagtacacctgaataacaagtgatatcaggccaagaacgtaaactgggatagttaggtagttgaccgaaagagaagggaatccaagcccagaaagaatagtgggtaggaaaacgttgaatccgttgatagaaaccgatgaggtaaagaaagcgataccaagaaggtagacaaaagggtctgtgagagcgatcttgatccactttcgttcgaatttctcttctcccctgcgcaaaaagtctcgatctctcttaagacgcattatttctttttcctcgtcattcaaaaaccacgctgtttcagctgttttcgggagacaaagtaagccgagggcgccaacaaaaatcgtaacgcagaattcaacgataaatagccatctccaggctgcgagaccacgttgagttcccatggtctgcacagcatatgcaaaaagcccaccaaaggcacctgagatacacattgcaagattggtcgacatgatacgctttcctatcaagcttggcgggtagatagtagaaaaaaggtaggcgaagctttgagcaagacctgcttcaaaggaattcaatagcatgcgaacggctatagcctggtggtaagtttggataaaagcagttccaagagtgcagaagctccacaggatcaatgctgctcccagaggcttattagcaccgaaacgcttgacagctaaaacccaaggcacttcgaaaacgatggtgcaaacattggccagcagtgtgatattgccaaattgaccatccttgagtccgatatctttatcgaagccaaatactctagcattacccatctggtaaatattagagagtgtactgttactccgaactgaggctttactcacattgttctggtccaatgaggagagaactaggaagacaaccgagaccggaaggacaaatttatcaaatttcttcaacacagctgcctctttctcagggtcgatatatatttccgataaaatctcgccgacttcatggttgatctcttctggggtcttcgcatcaccctggagggaattcttgtcggattccggagacgacatagcaaatatttgcggcaagtcacgagtgggaagttcaaaatattttctctttgatcaagaaggagcaagatgtccatgggttcttccagttgtatacctaaataatatatatctgtgtactgtgatatagatacgtcgatctggttaagataaggatcctgcaacctcggcagctagtctcgagacgccaccggactaatccgactctctcaggacgaaaaagatcatgagatcaaagatatatgctaggtatatgtatctaactcaatctaagatttaggtatttgttgggataatgatatgacaaccgaaattccttgcaaagcaaggtcacgtgaatcaggtacttgcgaactaacatgaataggagactttacacatcttcaatgtcatcacatcatctataccataggggataatctctgatggataataaaagcttaacgacattatataggcatcggacctttttcgtatccctttataatccgatcggcttattcctcggcttatgccgatcgactcgttaatctgcattggattagtccgaatcgggtttgcatcatgatgcaaaacctccaacagcaaaggtcttgccatcgggaggtacttaaccttgggtgaactgctgtcattctcaaatacatccttttctcaactacaatctcttttgcctggctcacttttaaagttgctaagaatccatcatgcagccattcaatcttactgctactgggcacaacctaaactatctccctgaatatatcgcacgtcgacatggatttttcgaggagcaaggactcgatgtcaaagtttctattcccaacccatgggacggcgtccttgatgcactcgctgatggcacagccgacatggctcttggtggcatttgggtgccggcaatgtaccgcaaccgggtgaaagactacacggtctttgcacaaattgcgaatcgctgccctcttgccctgctctgtcgtagcccggcaaaagacttcaagatcgcggatgtggctggaaagacagttttgatgaagggtatcggcggagccagcgccggtctattcttcaaaatgtttttacgcgagaacaaggttgaccaccgatctgtcgattatatccaggatctcgatgggaagatgctgggcgagttgtttgaagggggaatgggcgactatttcgtgacggacaacctctcggccaaggcgatgagtgagcggaatcccaaaatctccgttgcgatgcaaatggtctcgcaaggtgaaattccatggagtgtatactaccaggagaccgcgaccatcacgcccgagggccttgatgcacagaggcggttctgcttaggcctccgtaagggtatcgaatgggttctggaacatgacgcagaatcatacaaggacgagctcgtcgaactcttccccaatatcccagttgatgtcgctgttgctgtgaccaattctttccgtcgcgatggcatgtggacgacaccaatcattccgcgccctgcttttgaccgttggcagctgggacttgccgaagctcagctacttgaggagcccttcttatacgaaaatctggtcaatgatgggcctgcagtgaaggctcagagtgagatgatttccttctcatgaatctaaaatggaagtctttgataatttaagactcctaagttgtctcatcttgggactggttttcgtacataagattttttgaatgtgaaatattttgaaatgaaagtattcttagaagacgagcatttatcaggtcgaaaataagatgaggaggttcatgatagatcctcgtggaaaattctagattttcgctagagagtaacgccgagttggtaaattctgctactttgaagctctgggttgttgattcagtgagctcaaagcagaaatttagtgatcgcaccgatcctacgtaagttgttttgagaatacgtttaatacttgaatacacgtaaaagcaaataagtaagacagatgttttgggaagataagaagagaaatgtcctttgtcggaataagccttaaaacattaggaactaaccttgaaactaggtgtaccacctcgcctaggtactgcccaggtgttctcttcattaaatgccacgatgcctagaagtgtgaaaggatgattttctagatctttgttggtattgtttcccgcatcatggatgtaacactgtctaaagctaagtatactagcgtattcatttttcactgctgttcatgcttatgcgtagcgtaaagtatatagtccgagacaaaatctactcatgcagttggaatagtgacataagatttcagtgatcacgattatatgtaagtccacctactggttctgtatgttctttaagtcttttcatatgtatacaaagtagtaaaaagcatagttaaaccgcaggacttccatgtatagccccgaggtaacctgagctatgaggtcagcgataagagataagcttttcctacaacacccctcacccgcatggaaggctctcaattctccaattcccccgaaattaccaagcgaaaaaaatgagcaagccagccgacgggaaagccgtgataatagggatctccgggccctcgagcagtggcaagacaaccctggcgcggctactgcagcgagtattctgcggggtgaatctcaagcccaaggacacccatctaaacacgttcataatccacgaagacgatttctacttcccggacgacaagtatgtacacctttacttccttctcaatacacatacccatcttaagtgaaaacaaccctccaaccccatcctaacccaccccagaatcccctacacaaccacccgcaccggcgcaaaaatccaagactgggacacagctgccgcaatcgacatccccttcctctcgcaagcactccactacgtgcgcgaaaacggcacactcccgccgcgcctccggagcaaggaagaccagaactaccagacgcattccggcgtgtcggacgaggtcgtgcagaagttgcgggacgaggttgatgcgcggttgcgcggggaagcagcagcggacagcacggcgaacccgacggtttcgttcttagaggggtttttgctgtttgcgccgcctgggcaggaacggcacgtgcttcgttctgttagtgatgctattcatcttcggctctttttgccggcgccgtatgagcttgttaaggcgaggcgcgaggggaggaatgggtatgtgactgttgggccggcgccgcaaccgccagttcatactcatgatactgcgggtgcgggtgcgggtggggaaggggcggggggaaagacgaggacggaggttgatcttgatgctgaggatgatcggccaccgcagaatttctgggtcgatccgcctgggtatgtggatgatattgtttggccgcagtatgtgatagatcattcttggttgttgattgccgaggatggagataaagaggagaagggtgagagcaaggatcaagagaaggctgatcttgttcggagggttggggatgggactagggctaggactgatgttggggtcgaggttgcgccgggatatgggagggaaggaatggatgttgttttaaggtgggctgtcgagctgattctgggatattatttagatcagacgtaggtatagagttatatacatgaactagagtaatatatttctgttgtctcttagctgcagtgattgcctccttcgtagctatactaagctaccttatcaaagattgattcgcaattagccctcgccatctgacaagacagtgtggcgcgtttcagaggttaaatgctcactacataaggataatcggggtaagtagtgataattcgaggtcaaacatggtatggcaataccaccgttgttgaggtcattcaactcaacaaggtaatagtatctccagttcgctcaagattaggcttcagtaaacaggctaccaaattcctctatagacagatacaggacacaacgagtaaaatggatgttagaggctttaagtttctttgttctcgattatccctctatacactacatcacaaccaatacgtaagaatgtatcatatactcttccctaattaggtatgcctttaaacctagttctgcctctattctagatgccgaaaacaataaaaaaataaaaataaaaaattctctagtcatatgggccgaggtgcccgaggtattgcaagcagttgagagtatatcaggattacaagtcgacaacgttattcgggaggattggttccatcttgataccgaggatgatctccgggtccatccgcctaggtatgtggatgacgtttttgaccgcggtacgcgacggatcatctatccatgggtgcttggttggtggttactaagggtcagaggatccatggataagaagagctggatccagggtctagcggagactaagcttattcggatggttaaggttaagactgatgttactactcagatggagtaaatataactacgtatacagtggatcatcaatagataattgtctttatgtttgctatctgctaacggcagcgaggctgcacctgattctgcggtttcccatcatgtcccggtattctcccgttaacgatactgaaccatcccatcgtcgaaatttactcccgcgcaattggtcctcgccatccaagaatgtaatcaatgcggtctctcagagaaattggggtgacctcggcaggtgtggtattgacatgctgctgaacttcaggttgaatgggctcaagctgaagatttgactctgccaggacagtctccgtctcttgcaccacatcagcattggtagtaagatttcctgcgtagttcactgggccatagacatgcgcttcgcgggagacatggctgagcaaaaagtacgacgaggagatgatgtggacagacgccaggaaaacaagcaattgaaaaaagaaattaatcagggtccataaggtccacagaccgcgtacacggcgtgacttcgttcgctcagcgactagagtctcgaaaactgtcgatacaggagctggagtttccgcaacggtttgcgtacttgtagacctcgaagctggaattttaccaaatagaggctcagtcagtccaaacttgggaatggaaccatcttggagatatggtggagttatctcgacgtcgagcttagaatggttaagcccgggaacacagatatctcccaattgaccacatgaaacttcgcacctagtatcagcattctgatactttgaaggtacagcttcctgcttggtcaattcataaccaggggcataaatggcataatcttcttggagaacagtttcagcatcactgcagctgagcgtggtcttgatccatggcaaccaggtgacagccttgcctcgtggcagcttgatttcccacgacaccgtgaacatgtccagagcttgagggatgctgacaatattgatgcgcgagattccagtcccatctgccgctggcagctgaatagaattgatcagaggctttttagatgtaaaaacagcgtcaaactcgccgtccgggccgccatgcacaaaaatgcagaatttgcactgctcggcccagaagttatgattgatgagatcgatggagcaagcagcgttgtatttgatcagataggacgatgggtcgccagcctctgccacttcggcccgtatgagtgtgttgactttgtggtccttgagttgtccgaagcattctgcatcgcacttccggaacggaatgacgaggtttcttccaccgtagaactgggccatcaagcagctttccacgagcgtatgtcttttaaaagacgaggtcatgaattccattccctgacccgggggtgttcggaagtagagataaccagactcggactgggcaagtcgaggcagtccactaacgaccaactcccaccaatcccacggtttccctttctgtagcctgaccgtgagcgaaatcgcgatttggtatgttgcagggtagatattgggaggggtttgcaggtaaagaatgtcattgtccaatacgatcttgggcttgtgcttttcggcaatttctgcagccgtctggggcagagggagtccatgacatgagaaaaatgatgccgatccgatggattcaagaggaaaaaacaaggtctcaatttctttgtcactttcttcggtgtcagaaatgcttccgtggcacacacaagtagaaagtgtatcataattccgctgaagcaagttctcttcggtaagcggctcggtgccgctcaagtcagtcgtgctgagaggagtttctgcattgcaccaaggagagttttcatcgggctccggtacatttccaaccgccgctgcattgccgtttcgcgagagatgttccgatgcaacgttcggggaacctggcccatgactcggccccgagtcttgaggcaacggcatgttctccagcaccacgctggattcgtccggagtagcagaacgcctgtgagtacgagtggagttggcggtgttctcgatggtgctcggcaggtcgatgttgttcatcataagtttgcgtcgggtgccttggtactcatcgtcaggaggaatcgagtcaggcagagaagcagccttggcagatctcttccgaggtatcgcagagctcgggctacccaggctgttgacctgactcttggaaaggtcagagagggttgagctatccgagctatcgacccgagtgtgcatccccgagatattatcagtacgacgagagatacgccgagaatcatcatcccgcgaaccatcgtgaacaacgacgctcccaaaatcagaagcagagatattatcggtagggtatctctcggtctcatcagcatattcttggccaaaccgccaagcctctttctcaggtggagtgtcggtttcatagtgggattgggcttcaggcttcaactcgatgacccaagacgggcttttggtggtgtttggcgactggacattgagaattggtagattcaggtttggacggccgcaggtttgtagcttaattcatttcagatgacagtcagtactgagacccaacttgagggttggtttttcagcgttacctccatggagatcgtgatagacactggctcttctggaatgccactccagtcgcaccacacatcgaggttgctgagagggctgtcgttggggttcatggtgacgtccatggtaggctccatgagatgaaatggagatgaaatggggatgatgaggaaatgagaaagggaagatacacgagaggaaatatgatgaaaaacaaaaggatagggagtagagtagggagtagagaagtgaagagggagagggagtggaaggtagcaaacattaggaaggcacgtcaagatagttaaccatcccaagtgatgggtttatgcttattcgtatcaagttccacaacatccctactgtctatcatcttggaaagatcagatcatcaaagtcttacatcgtcaattaaaaaaaaaaacacgagaagcagcacttgcaattagccagtgatactgcttttaagggcctgtatatacaagaagggcttaagaataatctcacttttctcccaatcccatgaaagaaagacctcccccttttatccgccagcgcctgtaaaaataaaaacctttagccacccagttaaagcatcaagcataaaaaagagaataatgaaacagtcctcccggtctatcaagacagaaggaaaaaaaaaaagaaaagataatatcaagccagaacgtcgagaacgtcaagcaaatcattggggcgttccattcggggaatcggggtgatcgaaggtggctgggccggccacggagccaaatcgatcgccgtcaaccatttgagatggaagaataggggtattcgcctggttttggtcgaaataagcgcgtgtggatccattggttccttggggatagtcgcgattccgctgtagaggaggaagtatagacgagctagggggtaagccagttcggacatatccctgagccatcatccctgtcgaatccggggtctgtctcgggtccaaaatccttagctgggtattctattccactctcactggttcgcagaggggtgtcgtacaggagtaccaggctggttcatcgccatcagttgtcccacagcggcctgctgctgctgggtggatcggctttgaccggtaggatcgggaatctgggacatgggggctgcttgcatgccggctgatgattgcattcccgggtacatctatccaaggtcagctcaaagagcttccaactgccaggggggggatacgaaccgccgcataatcaggcaccacctgtcctgtggagtaggtctgcatggcggcaggcgtttggtaggtagctggctggccagcgtacatagcagccgttgactggctgtatggatccatttgacgggccattcgaccatccacatcatagatgccctgctgtctgccatagtcgattgaagtacgatgacgcttgactggcggctgctgagcgtagtacccataatctcgggccgtcggcggatagcctccataactagatgatggaggaatctgcaccgactgacgctccggagatcgagtagggactggtggatgaaagtcgtcaggtcttgtcgatcgtttcctgcggctgttaactacaagctttcacattcctatgagttgagggacgtacaacatggtgcgaggctctttgcgaatgcgcaatttcacaccttgatccgcaaatgatcgggagaggtgggttgactccatcattccagggaaactcttgggaggggatactgcaagcttgtcagaacctgggttccagctctctccacgggagattcgtacctgtgaacctttctgagataacggtcttcaaataagacacacggtccctgtttgcttgttaatttgaatctggaccaagctcccgaccgttactcactttcgcatctcgaacaaggtaaacttcaggcgaaagtcgccctcaatcttgaccgagagatctccaaagacgaaaaagccgccatctacaaactcgtcagtgaattagccccactcgaaggccagcctgaactaaccgctgttgtccacatccttcaaccggtgaagtgacgaaactagggttcctgctaatgcagtcgacggtgcgacgggtacaggacgctcttctgttgagtcgtacagactgcagcacatgaagtagtacgggctttgcaggtaatgtctgcgccaaaagtcagccagccgcgcgaaagccacggtgaattgcacacttactgtgcgaggtaggtgccctcctctcgcacccggagctggacgatcgggggcggatcgataggtttgcgctctgcaagcgtgattagagtcgggttttcggccagttccgtgggcctccgctttacagaggactagctaggactaggaacgagaaagaaagaaagaaaagagcttccatacctttttccttgccccccgccacgcgggcccggttgggctgctggcgaatgatcaagtcaaagtcagaactggtgttgttcaacattgtcagtgggattccctggacgaccgcgtaagagttacgaccctgtcaaagtagacacgggaagaacgactcacccctgagcttcgcgcgagagagaggcgtcggagaatgtcgcactcatcaagacgagtcacggacaaacaagggaaggtggagagaacccccgaattttgaggttgctttgagagcgagtgaaccagccgatacgcagtgtcgatcctcgggaatacaaagaccaggagcaagtgatctgtggttttacaagggaaagagtgggaaaggaagggaaggaacgggtctttggaccgacagaaatccagtggtcagcgaagataaggagcgaagagaaaccctggacgagtcacgatgtcgtcggagaggggtggcagctgtagtggggtaatgggatttttttttccgtttcctcagccttcaaccatggacgagcagacaaatgaaggacgttggagaatagagagagtgaggttggttgaaggacggatgaggttgaagacgaaaacggagtggtgtcgtcagtttgcaagcggaaagagccaaccgagcgcggttccagacaaaaaccttaagcggctctctctcttgatggtataacggcgccccgagaactgtcgatatgccgaccgaaattggacgcgcgagaatttcgcagtaaattggggggagggaaaaaaattcattcaaattcagaaaaaaattcaaaaaaatcaattggatcacagccttccaactctctcagttgtgaacaaatcagagtcgagaatcccacaaaaaaggaaaaaatcgacgaaccccgtgggattcagctggttttgtttaaaagaaatccgaaaaaagggagaaaaaaaagggaaatgcaaagatacccagatattctaccaccgtagcaatatcttccaagggaaaagacctgagaagaccggaggtgataaagtccaagtgtgactgcctgcctggaggggaaaggaaaaaccaaaagaagaaatggaaaaagaaaaagaataaaaaaaagaatcgaaaaagaaaaagaaaagaaaaaagaaaaaaacaatttagcccggagaaggcagaaaagtggaaatagaattcagccaacccacggttgggcgaatggcgatccggatgcgtagtaaaccgctgcctctcttctcgttctcgttggtccgacagagaaacggcgaaccgctagtccgttagtccgcgtctgggttctttatgatcgtacaaaaaacccacaaggttggcgccggatatgcaggtgatcagacccggttttcttgtccgccgtaaaggtgttggtctaaacgccaggtggactcgggccctggtccggcgtctaagcattccagtcaaaagtggagatatgcacgatcaagccgcatcgcctatgtccggggattgctgctgcgtctccactcgatctcagtcctggaatcattagccatgttcgaataatatcaggacacctttcgaagcccacgaactgccccagctcggatatcgctgccgcttgtcaacgaaggttctaaccatggttgggcagcctttcttatgtcatcccgaaccaaagaatgtcaggccctagacctcccacaaatcgcttggacacccccctaaacaaacaaaaaaatggaagaaaccataccttttttcgtgccctgaatgctcctttcagtgagaaatccaatactcgaagatcgcgcgtgaattctttggtgttgtgcgtggatcactggtccctggaagacgcgaaggggctcagggcgaaaggagtcagtccgcgcgcgttcgacgactcaggtccggcacagtcacaaattgcgcaaatgatcgagatcccagtcacaatagcgtgtggcacgtcgtaaaccccgagagcgacggtcgaacactggtcgaacaccttattccgatccgagacgaagcgacacatgccgagtcatgatgcagtggaaagcgaggagaaagagttgagtcgaggagcgaaaaggaagaaccacgaggcagcgccggagcaagactgggacaagacgttttaagggggcaacaacggatcaccgcacagggcttgccccgtgatgcgtcacatttcctgacaggcccaagatctcatgtctcatgcaagctactgtatgtcgactgcagttgggggcgtagacgctggttggttccggaaatccctcggtcgagctataggccggggcagcgcatcagccaatgcaaaaacacaccgaaaactgggttgcagtcttgtggcttgcggcttgcgacttgcagcttgcagatcgcgtgtttgcgtgataaaaataaaccggtactttctagtatggactacggtgctctgcgccacactcgctgaccctcgatttgcggctgaggatgtacggtacttttccccctcttcagacatcttccaggtgagtttggcatcggtaatgcacaagtggatcccagatcctaaggcattagttgctgtatcttgccgagaacttgcattccacactctcataccggaccgcttcttccttatccttttctcagcatatgcaaaaaaaaaaatctcaaatcctagcttgcatgcagatattctcgagtcctgggagtggcatcacggcgcttgccagcatgtgatacggagagctgcaggtgcagttggccatgacaaccattcctgtcacagtccacctatctccgcatcatccgagctctgatagcaacgatcatatgtaagggtgagaacagcaagactcaattcgatcagagggcgccgatcagctcgacaaaagtccggccccaacattgaatcatgcagccagcgtgagatcgttattagcgagtcacttgactggagcagatgggacccgctgtgggggtttccgacagcactcagctcccgagaacagcgtctgcgattcgcttaactgatagttcccacggacaaaaagggggaagtcgaataaggagggggtaaaaaagtaaaatgaggggtggaaaggcgggaaaacacgcccagggtaccggcattgtttgctctggctggggttgaactgttggttcttatgcattgccttacaccccggcgacaagttcctgggaatgcagtcgataggcccgaaaaaaaaactcgcagccctagatgcatatcatgatgcgacaagcaagccgcgctgggagcacgacctgtcacttccttttgacttccgggattcggctccggggccaggacagaagtcccaactctcgatctcggtcatggcggggaaagccaccatttcatctgctgcagagacatgattcaggtgaaaaccagcatgactcatcaagaccgataggaataattgggcgaagggttggccgtgacattggtgctaacaagtcgggagacacgaagagagaaaagagaaaagaaagaaaagaaagttcgagtgcgaaaaagcgaaaaaaattaaaaaagtgaccgccaaaaaggaagcgaatttttcgattttttttccttttcccaatttaaaagtacagcgcacaccctgacccaaatccacagcggccccgactgaaaaaaaaaccccccgggaatttgtcagtgtcgggatccaagctagttaacttacagactccggttaataaaaggacgaaaagaagctcaaaacgggacccgtggagatccaatccacaaaaaagaccaagtagcaacgaacccctgttcggtacttcaacaacacgaggtacggagtgtgccgtgagggaaagggaagaagggagggggggggttgccgcgatggagcactaaccaaccaactacaacatacatacggagtactcaagacggtaactgtacggagacgggagaaggggaaaaattccagattcacgcagacagacgaagaacctcacggtgaacaggtaatatatctgacagcggcattctccattgggatccagtggttaggcgctactgtgtttatgcttaaatgttggccctgcgatggttccgtggtggttgggcggtggttccatggttgtgttccctccctgacagctgtccggtccgtgttggcgccgtggccgccgatcttttgtcgatcggtgctttgtcgggactatacttattacttactatattattgcactgagatagttatcttgtattcctctttatattttgaatatatccttcaagatgctactactagtagttaattggttattacctgcgctctgtattggtcccaccgttcaccggtatggcctgaaatcctcccgtggtgggatactcgataactagattctgcagtgtaaccacgccgggaacccgcacatcagccacagcgttatgcctcgtccctcgtatatagagggggtctgggactacatacaattggctacaagatattatcgaggctatcaaaaatattttgttaatcttcttcctccaatttcggcatttactacaggtccttcctattcgaaaattttcaaccagcattcctgcgacaggactcttattcttggatatatcatgtgccaggcacatctactccgtatgtacactagagcaaagagctacccagtatttgatacattgacatgagacatgctaatcacacactgtactcattcatcgcagctagatagaaagtagaaaagaaacacccaagcaaaaaaactccagacaccctgctccgtgctggatgaaatccctcgaaaatggactagtaaatgagccagagaggaccgaagagtgccgcatgacactcatttcgtccccggacacccacttaacataacgtagcctttgaacaagaaaagaaatggaggaaaaaaaaatattaaatcgaacggtaggacaatgcagttcccggaaacacgtggaaaaaaaagagaagggagaaataagggaatcggaaatttcgttagaacaaacgccctatccacatgcgtaacttgctttgcaggcaaaaaaaaccacgaatcgtcagcttcaagattatcatgtctgcatcacgacatccccatccacttcgtactcggcgtcaatatctgcatctgcatctgcgtctgaatctgcgtcggtgccattggtagtgggcatggccttttggccctcacctttggaagcagactctagctcggcgggaaccataacgtggattttctcgaccaaagccttccggactgatcgcggtgtcttggggttatcgctggatcggcgggagactgctgttccaggcgaccgcgagatggagttagttttctcgggggtactaggtgcttccgtatcgtcattggacggctcggtagcatcaatgccattcgtcttgacaggttccttgggagcagcatttccattaacatgctccggttctttttcggtaccttcttcgagtacaggagccgtgtccttggcatcctcatcaacgacagtttcttcctcgacaactccgctctgttccgttccatgaccattcgcctgggtagatgttgcttcagctgcgggagagtccgtgagaatagagcttctcccacgacgagtgctgcctccgggggtgaccattgccagcccggagggtcgccgaggtgtgccgcgaccgccattacgggcagccgtgggtgtcattgacatgctattgattttggtgctaccagatgggcggccaggtctgcgtttagggggtgctgcaggaggcacaggaggccaaagttcgaaccgggagggtgggattccagcggcggggttggggattgcaggtggttcggggttgaacgcagaatggtgggagccattagcattaggccgcaaagccaatgtggaaggcggtccagcggagtttgcgagagtgtttccaaccgacgcattcatcattcgaatattgcgctcatagtcggtcgctcttgcctcggtctcatcttcatcttcgtccgggtcctctcgaggggcgacggtatgaatgggagcacgatcgaaatgagactgattactacgacccataatgtaaggtgtccagagcagcgcatctggattgagctggacgtagcccttgttttcccagccactgatgacctcgttgtaatatttgtgatcgagacggatggcgtatgtcttggtgatgggatcccgcacgagagctcgaagtccctccagggcggatacgatatcatctgccgtcattcctgtgcgatcagacagatctgcaatgctgacaggcgtcttcaaatcacgaagttggtatgacaaaatcaatcgccaatagtttcggtacgacaccagacccatgtcggagagaggcttctcgggcgatccatttttgccttcgatgcgagtaaggaggtatgagaagtcgataaggaggtttccgtagcctttgcgttgatggataggcagagtaagaatgcaggaaacgttattcgctgagcttggacgtttttctttactgaagtagccaacgaaatggcagcccaaatcgtcatactcagtcatgacatagaataagaatggctcaacgtcgtagtaaagagtcttggagcctaggaaaagtttcgcaagaaggcacagattttgacagtacactgggttcttgcgcccatcaacttcgaagattgagatcgattgatctcgataaatctcatcaccgggggggtgcttcgcaggacacttaagtttatggcgccaggcgacgaagtccgagttcatgtatttgagacagaactcgcaaatgtacagaacacggttacggctgtattcctctgggtaaggcgctgcataccaggtttcgatttcatagccaccaaagttgatagacttgatcttggaaggaggaccggaaaccttttgtgatgcatgtgctgtggcctcgccgctgagttctgcttccttcactttctgttgccattcatcttcggctttcagacgcgcctgttcgaatctgtcgcgatcgaattgtgtgggaagtgtcctggatgtatcttgttcgctttcagacagtatgcctccgtatggttttgatttggcgtcgtctgtctcacggtcaaacaaagtcatggagttataggatatggggggaaggggaacgaaatgtgcctggggttctggggccacaggtggcggctttggtgctctcttcttcttgcgttgcggtcggatttgagtgcctgttattttggacatttttgcctcgtccagccggaacccaataatcaattttccaaactgcctagttaccacgcggcagtgctctcggtccactgcgcgagttcgtctcacgcgtacagaacgtgtccgagcaggagattggacatcaccatcagcaatcgcatccccctccaaggccgcatcattcaaaattgggttatcggagcggaaagatgtttgtcgaagtctctttcgaagcacaggtatgtgttcttcggcctcgattgatgaggcctttcgctttcgaagcgatcgcgagctattgagcatctcgtcgtcaacgcctgtgttgaagatagaatggaatccctcgtcgtgtgtgccagcgtgcgcaggcagaagctctttgggaagggccgaggctccgagtgtggtttctgtcgttgtatttattatcgggtcaggctctaaattgttttgaacacagctgggacacctccatgggcctgtgttgatgttagtgcgtgtaaaacatcggagcgggataaagcagagatcgaagagcatgtgtttgcgtaccatccgtttcatcaaatgcttcttgttcccgagcgcattgccgatgggctgttggggtatcgagtcagtgatgattcaaaataaacagataaagggcagggcaagcagcgtaacgtacagtgatcgccacaaacaacacaagtgagccattcctcaaaatcttcgcttggatcgtgttcctcgtcttgactgcaaaccctattggtccgttagtacatctgattatgcgcccagtgcggcgagtccttccacttacaagcagtttgaaccactgcgaatatcagtctcgacgtcctcgcgaccattgctctcagcttcccagtcttcggcttctgattcgtggtcgcttgattctggttctgacgcgtcacgttcatttgcctcaaacccggggtcggcatctgcatcggctgtctcagactccgcatagtcttcttcagaacccgcgtcatcgtcgggtagcttgacagctccaacaggttcagccccatcattgtcatcatcatcttccccgttcaacttgatgctgccgttctttccgtccgcagtttcatccgggccatcctcatcaacttctccagtgtatgctcggtggacggcatcttgaagccgttgatccatttcatacaagtcagtctcttcttctccctccgcatctagatcgctatcggccgggtccacaggcgggtcaagtttgcccgattcatcgttcgctggcggcaccgtcgccgccatagtgaaagttaccgccaccgccaggttgagcacagtagtgcttattgtatgcgctgaggctaactggggtatattttttgtgaaagaagcttagactgatcgaagcaccccgctgacgtcggcgctgatccgggggtgcatctggatcaaaagcgggttcgaggctggctagagtggtaccgaagatatttgcgaacacaagtatcgatcgggattgacgcttaaagttttcaggcgcaaagttgaagctaaacaaacaagaggtgtcagtctgcggctggagtggctaggcatcgcaagcgcgtcgcaaaacagagaaaacttaccccaaaagaaaccagtgcaatatttgatttaaaagcgtaccagacgcgtcaactggcagtccatacaccggggcctgtctcttttacaatcgaatgcgatttgcagcggccttcacgccccttgtcctgtgagtgtcgttgcaacgtgctgagtcagcccaggctaaaccacttcgggcgggggagacctcaagcccgtcgctgtaggaagagacgctcccctccacactctccgcgatcgatctactctcctcagtccgtgagaggctttgtgactcctaattctattttgatagctctttccgattatctacatacccatacaaccgcacaccatgggtgtcccttttgaggctctgattccctatgggattatcatgaccgtacgtaccattggtcaatgcctgccgagactatagctcaccaatcgctacagatgtttggtgtgactggctacggtctccactatgtcaagcgttttgccaacgatggcaagaaggcgcgctggaaccgggacctgtgggatagagtaagtgtttcattctcgtcggctgcggtcgggacttagaggcacattagctaacaatttcacagcaaagtgagtgattatgagactatcggccgacccaaaagcgcctaggaaaatcatatgagactaatagcaaccaacaatagtgatggagagagacctgcgcatcacaggctcattccgtgggcagtccagcaaccaccaagcacccactggatttgaagtcagcaacccttggaaggtacgaataacagatcccctgtccctttggttccaaactccgtgcagaaacgctgacccgagacatagatcgagaatcggatctactagtttcaaaatgcaacctcttttcctttacgttcaatgtctgcgccttccttaccccatgatcatacatatccactgcaatttctctagaaacgtcgttgtaccatatcatttgttctcttgggtttcctagtagtccgctcagtctacttgagctccgaggtcattccccgaataccttggatctcactctcacggagatgcatatcgaaatacttggccagtgcctcgacgcggtcctcttcggtctccagcacctgcaagatctccgtttgcccgcgcaatctcatcttgacttctttacccgacatgatgcactgacctacgatctctgtgccgcttgggcccaaaagcattcgcatgcagacaaagatctgggtgaaccagcttgttcggctctggctggattcgaagttcatgacgctgaaatcctgtggtagaaactccatatcggaaaagcagatctgtggcaaccacttgctctcagggttgtatcttgtttggtaaatccagatcttttggctagagtttgtgaactcagcaatgctttctctgacaatacgcatctcagatggtgcgatagccgtagcagtagcaccttcttgaagtaatagtggagcagtggcacaattgtttccaaagccgacatcaacctatccatatccgttagcatggttcatacactacagtagaccttcataccataccatgtacttctcccctgcgatgatcacaatcagaaccatatgtccacttcggatcaatagtgtcagctctactgggaatactcggaatgctaaaccgtcggagaacttacaatggcagatataatccatcatccactcccttcgccgccgcatgactgactctacctccagtggcgtaaacaagataccccagggaccgcaagacaataaagaagatcccggtgttctccatgcaatatccatccagccggcgctccaccatcttctcaaagagacattccgggttcagagatatagtatgatgctgcgagtaatgcagcgctgaattgccccatgggatggcagtgagatgtcgcctttgcagctcacccagcgcagaaagtgcgtcattctcgatatcctggcggagatgttgaagaagattgccctcggattgggcggaatgggagtatctgattcggttcaagtataactccagctgttgatcggtatatgtgggtttttgtgccattgatggggttccttgttggaatttgtgtgttcaagagatataggaactgtctctggccattgagagtcggaattattcgattctctctcgagaggactagttatgtatgtcattggtattttgatgaccaatagtcttttccccacactttcccgcacatcattgcctccacgcgcagcttatatagtgtctggctgggtttgtgcataattcattttgtaggtgcctacatacacttttcagtgttatccgcctagtcaatctgtatagcttagaatagtgtatatagaaaaagatgacaaggcacattctatacaaatgaacagacataaacgacataactatggatatgcatgagtaattccaacaaatatcgcaatggaaacccgagaccctgtagttacagtactaataaatctaattttgttctgtttctgtacatatgacatgtatattgttccttgataccccatgtttcctgcaggttactgttatcaatcacctcggctatgaccgccgcttgtgaagaacataattatccagacataattaacaaatttgtatataagatatagaaaatagaggatttgattgttactgctctctcaatatcccaagactaagcaatacataggcttgtgaaacgtacctttacacgctccgagtataaatctccgatgatgtagtattcatccgatatccggacctacggacatgtggttcgatcagcgaatatgaacctttagctcatcacatttctctattacttcttgtctaacctctgctttgtacagtctaacgtctatacatattccaaacaaattccccttcctactgtgaaccccgcatctgaacaaaatggctacgctaaacgagcaacttgcgacattgactgagaactactcgccctgcgatgtatgccagcgtttctttccataaaccgtcagacgatgcatctaacatcctaatttcccaggtatcagacgccctcatcaagctgcaaaagacacccgagggcagcacagcacgagcaggctacctcgcagatctaggtaagccatcggcaaagcctctaactatatctccaataaccccacttacatctatcaaccagtgccattctcgcccacgacagggcggaatgaaacaatgcccaagattgcggctccggccacaacattcaaatttctggccaaagacgccagcccgccagcaatcgcaactgaaaatccccagaagcacggcttcccgccgggtaagcactgggtagatcacgtcggcgcatttcaagattcggatccctccggtgccggatctatcgttgtcatcgagcagcctgagggccagtactgcgctgtgacgggcgggatcatggcgacccggatgaaagccctcgggatcaaagccacggttgtgggtggccgtatcagagatttgagggaattgaaagccactggacttccggtttgtcgttgatctcccataggtttattggtagcgttactgattgattttcgcatggtggtagatctgggctcatgctacttctactgttggcaccaatgccgaggccaaggctggtgctcgtgatgtgcccatctcaattgggggtgttactgtttctcctgtgagttctagttcctgtgtgctattcgattgcttgatgatagagtgcagaatctaatcattagaatgcatttagggagatatcatcttctgtgaccccttggaaggagttgtggctattcctcgcgagctgctcgggcatgtgctcgagctcatgcctaaactcactaccatggatgagaaggccattgaggccgttgcgcagggaatgagcgtcactgatgcttttaagcaattccgctgatagcctactttcagccaaatgtatatacatataacgttaggctacggcagtctctatgtatatttttggtagtcgctttgtagctttttcaaatatctcttcacgtatcttttcggatgtatataaaggcaaaagcataaaccgtatagaggactttccgagtataacctctgaattgacgtgagattgatttattcaggtgcaagccatactgcaggcaagatctgatatggcttactgacggctaaagactgccgtaggtattgaaccagtaaggaatctacagcgatattattaccaaatgtatagcatatatgctggtccaatcttttggtattcgaagtatacaatacataacgagaaatctgtgtatccaaaaaagaaaaaaagggctaaaagccaaatcgctgtgcaaatatacaaccgaaactcaagttttgcttactccgacacccagacggcggccatacccataccggtaccgatgcacatgctggtgacaccgatcttccggtttgtgcgcttgagctcagtaagcaatgtgctgacctggcgagcaccagtgcagccaagaggatggccgaaagcaatagcaccacccttggggttaatcttctcagaaggaatgccgagctcattaatacaccagacacactgggaagcgaaggcctcgttgatctcgtaaatgtcgacatcatccttggtgatgccggccttctccagtgcaatggggatagccgcccaggggccgattcccatgagcaggggcttgacgccgacgacgctggcagcgacgtacttgccgatgatcttctggcccagacgctcggcggtggaccgcttcataaggaggacggcggcagcaccgtcggagatctgggaggcattaccagcgtggatggagccgtccttggaaaaggcgggcttgatcttgcccaatgactcggcggtgataccctcgcggacgccgtcgtcggccttcacggtaatggtcttctcctcgccagtcttggggtcggtccacttcacgtccaggggcgcgatctcctcgttgaagagaccagccttctgggcggcaagggccttttggtatgagtgggcggcgaaagcgtcttgggaagcgcgggtgacgccacggtccttggccatgttctcggacaggacacccatggggactttgcagtttgcggcctcggggtggctctcgaggaggtcggagaactcggtcacggcacccggtctgtgtcaacttgttagccatagtatcgaatgatggaatgccagggcttgaagcatacccgtactgagaggacatgctctcaacaccggcaccaatgccgacatcgatcataccagcctgaatggcgttggcaatatcagcgatagcctggagaccgctagagcattgacggttcaagctcttcacggcggtgctcgcggggaagccggccacgagagcggcagcacggaactcagtagcaccaccaccgggggcgaggacggagcccacagcaatgtcctgaacgacgctaggatcaacgccgctcttgttcagaagagccttgaagacaccggcaagcagatcagcaccagcggtatccttgaagccacccttaccacccttggtgaaggcggtgcggagggcacatgtcacgacaatatcatcggggtgcttctcgatgatagcggcggctcccttcttgccgccagggccgaagtgggaggaaacctgattcagacgttgctgggctatagatagaagttagcttgctgattttatttcgattataacttggaacaagccactaggcacaaagtattctgttgaatacatgcccatggctgttacgtccacagcacttaccgttagacatgacttcagtctgttatggaggtatgggagaggtatgaggattaaaaatagggcgaaagcgagaataataaatccaaatatccggggaagccttgatttataaatcaggcccgtggagtcggtggtatttcccctttggacgactgccgttactggccgttgtcgcattctgggaaagtgccgaggtccatttggccgcatcattgttgatccgtggcagtcacgggatctccgactggtggatcgtggggcatgtgaaatcagatatcacatgcgaaggttttgcgacgtcatggtaagtagatcggcccgacataagatggtgcataatatcgatatttttcaggtgttgtttgcacaaaaattatttctctactggtatctcactttgaataccgagtataacgacatgtatccacaattaactcggaatggcataggttaatgatttttaacatttttgtcctcatatatcaagaaaggaaagtttattctaatcacatcccctgatagctcagctggaagagcgcaagactgtaattgtcctgttctgcaaagaacctgtcatcttgaggtccctggttcgatcccgggtcaggggatttttttgtatttttgtgctacgtacaaactttgcctctctggtgtgattcctccctaacactactccgatccaacacaatgaccgcaaattcctatacggtcgcggatatcaatctgttgtctgaattcctcagcgacaatcaagtacaaaatctctccaccatatcccctgtcgactgcattgtcatatgcgcctcagccgttctccacagtgccgaggttcttttcaaggttcttcagcaaagaccatctcttaccaaagctctcgtactgtgcgggggcatcgggcactcgaccaagctcctttacgatgcagtgaaatctcatcccgccttttcgcggattgccgatgagatccaaggtctccctgaggccaaagtcctcgaacgaattctagacgagttcttcgatcgatctctcattaccaaggaaggatgtcagattctccttgaacccctatcaacaaattgtggacagaatgcttcattttctcgcaaagtcctcgatgaagcgggctttcgggcaccagccacttgcattatcattcaagaccccacgatgatgctcaggaccagggcatcgtttgagaagacttatgaaggtgcccaacctccagtctcagttattagttgtccggtatttgtgccgcaggtgcaattgtctcgtggcggagtcattgagtattcagacatgtcgccgccgtcagagttgtggtcgcaaagtcgttttttggagctgatcatgggcgagatacccaggttgagggatgataaagatggttatggtcctcggggacgtggtttcattgctcatgtggatgttccaagccatattgaagcagcttgggctcgactacaagtggtggctaaaagctctagatagggatgtagagatatatattgcgaataacacagacggacatgtgttgtaccttaaaactacaaaaatagtcggccgcgtttgtggcctctgtcattgagaacgacatgatttagctagctcgatggtaggaacttataacctttgacatgtgtactgcgatagaataagaaccgaggcatcattatggagatcccgtgcatacatatacctgcaatgcaagtacggcccacaaccccactacaatatatgtactgtacaccgtggaagtcttgagtctagagtgaacttcttgactgtttcaaaggattaaaaaagaaaacactcagaaatattggaaagatataaaaaataatcccctgacccgggatcgaaccagggacctcaagataacaagttcctttcacagaacgggcaattacagtcttgcgctcttccagctgagctatcaggggatgtgattggttgattagcatatttgagcattatgaaccaaagccatccgacctggcttatacccgagttgtccactttaacttaattacaaccttggaagactcaattacttgtcgaaaataaagctatacccactcactggtcaaggtcggtgtatctagataagctggcggcaaaataccctccaaatcagctttgagttgaagcgccaatgtcctcgagtgccaccggtgttgctgtgtatagccacccatcacccaaaagccatgaaggcgtgactgcctcttccataagccacgtatctcgccctcggaatcaacaccccatgtggcgtcgatgcgagcagcaatctggcgaggcccaagcttctgcttactatcggcctcgccgtccacgctattcttgtcatcctcggcaccgttgggagcctgacctggagagcctcctaggatctcagcggcagtttcgcgcacgtttttatcaacaaatcccgtacaccagatgacagcatccgcctcaacatggctgccatccgagaaccgcagcccagtcgccgtgtatgcaacaggctcaacattagctttgataccagccttgccttcttccaacagcttggtaccgcccacatcgacatagtgtccaccagcacgctcgattaaattttgcatcaaagcacattctgggttattgctgtctaggacggggaatccagctgctgccagagctttgtagcgatctggctcctgtgatgcgaaatgcgaaaacaagttgcgggcgaattgggcatctatgactgtcgggattgtcataaaacagttatccgcgagctcaacgctggcatcataggcgcctaggctggctgggttgttgacgtagtccactgggactatgtatgttggcgaacgcacgttcattgtcacttggagtcctgcagcgtggcaatcttcgagaatgtcgaaggctgtattggcggagccaatgattatgactgactggagtggaagtaatacggtcaatctcggttcttttcgcatcggagcttcacccaccttcgcccctttctccttcacttgctcggcattcttgtattgctccgaatgaatgctggtacctttgtacaggtaggaatctgctatcgatggtatattcactttttgggatgcaatacctgtggccaagataacgtgtttagatattgctttacgttgaccagcaggagtctggaacttgactatccaccgcttagtcgatggatcatactctgtccattggatctgtgccgaggtgattatgttgagattgaaagccttgacatattgtcgtacctgggaagccagatcctctttcgaaagacgatggggggtaaggagcttctggtcatagtctggtttccagatttctatcagtcgctcactcggatatcaaggcatgagcaacttacccatatagggcaagtgacagagtgaagtgaggacatggaaacgcatgctatcatagcggagagcccagttgtcccctgcgtggacattgcgctcggccatgacactctcgactcccaatgctttaaggcgcgccgcaagggcgatagctctttatcatccagtggcaggttagcatggatattgttcgaggctttttcgtcttcttacgaatttccacctccaattatgaagacttcagtctcaaagctctcaatcccaccaaattgtcttccgggagaatgaagcaaggtctcattctctttctgtatatccagatctttgagaatggtgctgagaacccagatcttccactcgattatctcgttggcgcccttgaccggcaggagtatcacctttcctttgcaagtggcggccggtgagctggtttgaaaggcaattccgcagtcaatgaattgctgtgcaaaaaaagtcagctaccattcacccagctctatctccacaggtcatgctcacaagaactggcgtcgcttggataaatatggccccgccatcgaccgttatatctcccttgatggccctcagcttgttagtctccagaagactggcagcaattatgccaggtgatttgaatgtccgcaggtggtatgtcagtgctagctgatccctccaatatgcctggtccttccagaagcagtcttccagcgcccccgcatcattcctagccagcgcggtgttcagattatccaatacaagttgagtttgcttggttggttcataatccgccattgaaaccggatctaccattccaggggcgagcagaggaagcgggttttgagccatcaacttgaggaggtcgatgcgcgggggaaactcgtcgcgcgacagggacatattgtctgtggatcgcacattagtcgtcaatacaatgcctacgcaccaatcttctaatgagaactcactggcagccattgttggattgaaataaatgatgtttgccttgggtgcggtatgaagattggacggccctccctgatcagtcgacctggcgataggggaaatgtcccgcatattggccgattcgtctatcccgtcttctgcagtccttagtcgcccgtatacgggttagtgcagcgatggcccgtgtttcccggtggaacacgaggccttggggcatggcagagtatgtctcccccgcaactttgaaaccaatttcatgccttgaatattacctttcaccccgtcgaggtgcccaatttccttcaaagaatgggccatggtacttcgtcggttgttaatgggcattgacctacataataagcagtcttcatacgagttgaaacctcaaatatggggccgtgcttggtgggggagccactaaccttttcgtccaagcttcaattgatcggcggtggtatgtccgctgtcatctgtgggagatcatcatttgtttgaaggcgcatgattgtctgtgaattgttcatgattgttccctcgggtcttgttggcttccgatctatttgaattggtatggtgcgcgccacctttttgttgtctttggggattctgccatccaaatgtgggttgtatagatatcacttggctacgaaaaggcatcgccctgcttgctacgagactataaacttcctaatactaaagcgtccgatatatttgccctaggatctacgctctacaagctagttgctggtaaggacctatatagcgaactctctggggctaaatccgatgacccggatattatcaaagctcaaatccgaagaaaatgtatggtagatcatgagattgaaacacggaccatattcctgatgtctcttattcggaggagaaatcacattaggttgttggagaggcgaaattcccactgcccaggcggcacttgattttgtacttgaaagatttcgtttaattcatacatgaatatagaggcaaaggagcgcaaaagtccattacaaccattccattccaaatgctccattcaatcaaacctaccaagctcatgcccgtgcagcccgtgcagcccgtgcagcccgtgaagcccgtgaagcccgtgaagcccgtgaagccctgaagccatgaagccatgaagccatgaacccccatagagatccacgtacatattcatagcttagagttataatttgtattcgtccatatacgacaagcaacgactcggcgaatattatatttaccgaaatgcaaggaccaagcagaatgaatggccataagggcggagtaagtatgagaagatgcacttgtaataggtgaatagaatagaaagcgtagaaggtttagaattgattcccaacgataaaagacattgggatgttagaatatgagttccaccatgctggtccttggagcctatatagtatgcttgctataccatggtttgttcatacggactagctagcccgatagcgcagccgtggccaacggtttcgcagcaatagtacggagtagagcagtaactatttaccggtgaagtcaaatacatcgtatcagcagtgagaggatacatatctaacagttttatatatattagccaacagaccgaggcgggacgtgggttgtgacattgaagagttggccacggactatagtcgcagatatgagaagtcagttctatacaatcagacagctggttatccgaaaaaaaaaaggaacgttggagagaaacctcgcagaaatcagatagcgcatacatactccatacgatctatacaaatggagtttgggaaaataaaaaaatcccctgacccgggatcgaaccagggacctcaagatgacaggttctttgcagaacaggacaattacagtcttgcgctcttccagctgagctatcaggggagtacatgatataagtggcaggattgtatattataacccaaaactacctaccagacatcgctcagtgattcacgatccatattcccaagaatcaccagccaatatacctccaaccgagccgaaagccaaacagacaaccaaaccaagcagataaatacccatgatccgacgcgccctaaccgccgcctcatcagcgcgcgcatcacccccaagcacattgacaagcgcctcagcctgcaagctccaactcacccggccatcatggcaccttgtacgcgacccgacccctcgccaagcaggagcatataattagaatgcctctcgagcatatctccaagcccaaacctcaagcaaaaaactaacagggaacccgcgccaacagagccccagcaccacccgcctcttcaccaccaccccgttcacagccttcacagcatcaccaccaaccaaagacccctcacccttccgcctcgccgcaaataaacccgactcctccccgccctcgttcgaagatgtctattacagccagtaccagccaaagcgccaatggcctccggatatgtccaagctgtctccgaaacaccagttccggcttgagcgcaagtaccggcggcgcgcggcgctcaagtatgcccggccgaagtttatgaaggctgttttgttgggacagtgggttgttattggatgtgagttttctcttgagatggggttagggttggaaatttgtggattgcgaattgcttatacacttgcggtggataatggggttggatttcgaggaaagatgctgactttttatgatacgtagttgtcattatctatgcggtgctatttatggagtgggagtcggatgatactgcattccatgcggtaagatatctctctggaaattatgctcatttgtgtcttgactaacattatttctagattcggaaaagcttctttgctggtctacagactgtattctccagtgcaccacctcctggcccgagaaaggatcagaaggataatacagcgtctgaggagagctcgtagtcgagtcatatttatgtctgacatcaatatattctgtaaaatattcaactagattccctacttgcacctgcagtctgccagaaaactccaaaattcaataagaaaactactgtcgattcatttaatcctcatatctgttcatcatttgtcgtgaagaaatcctgtcggaagaacaggcgtcgctgtaccatggagagaaggagaaagagacaggaaacatcaacagtctgtctctttctcgctttttgctccttcgcctgtgccaaatatggcttcattacatcatgtccgcaggacttctctggacaaggaaatgcagtcaacatgccaataacaccaagaatgccaaggcctgtcagaaatgacagacgaccagtaaactccaaaggtcaagtaaacaaaaaaacaccaacaaaataagttggggtggggctgcttgaggaccagccctaacgccgagtcatgatcgtatgaaacccaaagaaaaggatagaaaataaagacaagagaggaatgggaaattcgttaaatggaaccggggaattgcgcacccggttcttaaagccagctgcgcaggtcactcgacggggtaagcgggccagcagctgggcggttgtccgcgaagtctagagcaagctccagcctgggcggccgctcatcgaccaggccttttctaggactaccaggcgcaaccttcttgggtgatttggtgggtgagccaggttcgccacctcggggcgggccttcgcgtacaaaggtatatggccagccatcatcggctgcagctgcgacccaggttcgcaggcaatcatgcacagaagaatagaacttctccttgcaagtacgcagactaccacccatgactttctcaaaaccagaggcacgaagctcatcacgaagttggtttcgctcgtcagtggtaggcagcatggcaacgaggccgtttacaagatcgagatgtgctgcaagatagttggtcgcatcccattcaacacctccaacgtatggggcagctggaacaggaggacgagggactgggaagtgacgctcgttataaggacgagtgtctactggtatcttttcgccgaaaaggtcttccgacttggggaggggaatcacatttaggtgatgaaggaaaatccagaagacctccttggtcacgttggtaatctccttacaccacactctatatggtcgcgactggtaaatattcgcaatgaaagtcagtggctggttgtccactggtggcgctgggtccctcagataagaaagaatctgcctagcgcgcttggctcccagttcaccaacaggagcagtggagagctgcgtaaacagcaggtttgcaatgataccccgagtggtgaactcactgggacccttcttttcctcgtcaaagagcatatgcagcagagcggggaaaagttcatcctcgatggcagtgaggtgtgctagggccgcagatgtagtgcaaagagccttcagacagagcaatgcctggtgcagaagggtgtcttcgtgatcctcactgtagacgggttagccactggttaaaaagagggagacagggtacataccgccaggtcatcttcataatgcggtagagaagctgcacaatctcatccattcccccttcagtgataaagtcattgacccattggacggtttcgttacgtaggagaagacgcagtttgtgcatctttcccacctcaaccatctcgggcttttggatctctctcaggtaatgcacaaagtcggaaggatccgctgcggtatcgacagcggccgcatcagcaagtgatgctgttgaggcattggcggacagggtggtgtagacaccaacaggctgagaaagatccacagaccttggccgcatccggcttgatgctccactatcccttcgcaactttttgccaggcgacgaggggcctttaaaggagaagccgcggctcctagatcgtgatcgagagcctttacgatcctgagattgggagtcttccttggattctttgccgcgtcctcgacggctatcgttgcccgcgctgggaggagtgatattctctgtccgatctttctggataaaatcagccttgatattagtatcaagtgagcgcattttatctctcatgttatgagggatgttccttgcatcctaacggtaggttagccttgatattcaaatcggttgtatatagtccggccaacaaaccagcagcttctcgaactcgctttcgaggtccttggagttcagatgctgatgcacttcagcatctcgcccctttgcattgaatgcagagatagcagcctgtacacgggaaatacgcttgggctcttcttttggcatggtagacggggatatctttcgtggactcggtggccccctgctcttaaaagaggcactaccgccttgcccaatggggtcgctttctcccgaaggtgcgcgctgcaacccaagaatatccttcacctttcggtttcctgtaagaatctctgacttcggacgaggcttatggtcagtcggtttggcgagggagggttgggagtagtcgcagaagttgcgttgctggcttggcccgtaacccttgggcatatagagagagacctcgtcctctacggttcgcctcaggtcggcagtagagttcggcctcgatcggccaatagcctctttgcgaaccgaggccgagtcctgtgaccagactggggatggcatgttatcaatcaggtcggtcgggctgcggttttccttgtcgcgactctgtttcgagccatccttccttccccgctgggacctcttgaggatggccgagagactattagatgatttggcctttttgggcgacaggtcattctgctcaagtggctcctccgatttaccatccctccgctccatataatttctgagagacttcaacgagacagcgctcttggtcttcttatgaagggcacctttgctttccttgccgcccatctttggcgcggccactccgtggtcgcccgcatcacgattggggacaatctcactgagtgggtggtagccagcaatgaaaccaggctcctcggtaaactggaaagggatgctctcgattggcttgcatctcggcataggtcgcgcggcggcggcatcgtcggctgattgattccgtttatgggttttagacgacatcatggcccggaacatggactgtttggtaggggatcggttcgcatcgtcaaagatcttggggccagatgtactcgcagccatcgctatcctctttgaccagcaactaggtacatcttgttagcagatgaagtgcatgaacacctgtggaggggaacgggtagttgcagttcgaactcacgggatctgtgcaaacaaacgcagaatagaacaacaacgcggtcaaaaaagggaggtggtcaagtaaacccttcaatctcaacaaagaacaaaaatgcggggaaggggataggccgggtggaagaaaaatagaagactcagatgggcaagctgcggaatttgaagaatcaacggcgccttgctgccaacagcaaccgtcatcgagtatcaagatgttgatccacttcgcctcgacttagcgcatgagacgatccttggggttggctggatggaaggtggaggagtaaacaacgtgcgggtaaagaggttgcgaggggcaacgccgggacttggcggtgaacttggagtttattagcaacagtgcgccatatcgggtctgtctgcgctgctttctgggggctagacatgtcatattgcttattattgccattcatttggggttatttctcagcttgcatgtagtccttgcatctttttgtttatttgactgtgaatgtgaatgttgttgttgttattgttgttattactgtacgcatccggctagttgtatatattggatagatccttgattgacacttgatacatctactttgtaatgtaaattatatgaaataccaatagcatctactaatctacaatcgtatcttacagggtatagtttgctactatcatgcctctttgttattgacctatgccgatgccggcaagactggccccattgagaataaacccactatcgtattacatgcagttatgtcgaacgacgctcaaaccactttttcagatcttctgatcatattttatgcagttagtgcgttgagtggaattcgatccacaaccgtttgcgacttccggtggcgggtacttaaggcgatcctttcacttcaaacgcagacataaaagacgggagaagaatgtaaaactgcgatctaagcggtgctttgaaggatacaaagcgatatatgagagacaagtctggtttatgtacaacttagggtttgccggtgccagaacggcgaatgacgaacatcgggcattttcggactggcagtattccaccaagttacttgtcgcatatttacattttggtctacaccccagaattcaaggcttaattcaagataaaatcatcttccagagcagctaaacaccagatcgagccaaagccaagcctgcagcatgaattgcccctcgcggactgacgacactctcgagaacccaagctggaatcaaagcccaccgcccttcagcccagacaccactacacggaatgactttaatggtctcgccaattccagagtacatcgcagacatgccagttcggccaatgcagctggagatgatccactatgcatcgatgacagacccatcagtcagcaggatcaagaccccggaaaggaaaaggtgccaagcggcgaagtgaccgctgcggactcgggaggtgattcacccccggggagcagcgggtcacctcgccactctttctatactagcttgaagtcttctcctctgcactgcgctcaaacgctcgttaaattcggccgttttatcggacctggttttcttatcgcggtcgcctatatcgaccccggaaattatgccaccgatgttgcagccggtgcagacttcaagtacgccttgttgtttattgttctcctgtccaacctatttgcgattttgctgcagtccctgtgtatcaagctgggctctgtgactggtttgaacctggctgaaaattgccgagagcaccttccgaaatggcttgtgatttttctctacatcctcgcggaagcggccattattgcgactgatattgcagaggtaagtgtcccgttttggatagaggtcctaattgacgtactgacaaacttggaaggtggttggatcagcaatcgcgttgaacttactattgaaaatccccttggtggctggctgtgctatcacactagtggatgttcttttcattctcattttctacagacccaatgggaagatggtgggacttcgactgttcgaattctttgtcatggctttggtattaggtgttgttgtctgcttttgcattcagctctctctcgtaaagaaccagtcagttggtgaagtgttccgcggatatgtcccatcttcagctattgttcagtcagaagggtaagtttgttcagctgcctctgtacagtattcagctactaacgcatcttcagtttgtaccaaagctgtggaattctcggtgctaccgttatgccacactccctatttcttggcagcggcgtggttcaatcccgtcttaaggaattcgacgtcaattctggttacgtggagacctctatgcctctagggagcgccgatggcgaagtcaaatatcgcccgtcgatccatgcaatccgcggctgcatgaaatactcgatcattgagttagcgctgtcactgttcaccttcgccctgtttgtgaacagcgcaatcttgattgtcgcgggtgctgctctctacgatctccctggcggaggcagtgccgacctgttcggaattcatgacctgctctctaagtcgatcgcaccagctgccggtttagtatttgctctcgccctgctactctcgggtatctccgctggaatcgtgtgcacaattgctggtcaaatggttagtgaggggatgctgaactggaccatccgaccatggcttcgaagactcatcacccgctcggtcagtatcattcctagcatcatcattgctggagctgttggcaaggagggccttgacaggactctgactgccagtcaggttgctttgagcgtgatcctaccgtttgtctcggcgccactaatctggttcacttgtctcaatcgctatatgaccgttcggaccgaagaagcttccgaacgagacggagaagtcgatgtagtgacagttccgatgcggaacaacctattcacttcggtcgttgcggttcttgtttggattgtcatcgttgtgatgaatgtggccctgctggtgctggtgggactgggcaaatcatcttaatctctagatgctgatcctttccagacacgagcacgccccggattgtagcgaaaatagatccatagagcttgataataccccctctaattgctatattatgacacatggatggcatgagatcttcaaatatgatatgaggtagcttattgcaacttaaaataaacacccaatcaactccgttggctgcgccttgacacagaagaacacccagttgccgctaaacaaaagcacgctttaacattagtcttatccaagtccgccagcggcctccttgaccttatgctgctccggcggctcatcaataaactgcggtggagccacctcatcctgtaggaagctcggcatagcactctcgcccatgctgctctcaaacatagattcctcgcccagcgcctcaagctccgcatccaactcggcctcatcaacatcctcaggaatatcataggcccgggagatactctcttgaatctcattcccgacctccatcagatccgccatctcatcctgcatctgctcgatcttatccacgtcgaccttgccatactgcttcttgagctccttagtggtcgttttcatcgcatccaccgtcgtcatcacattcttcaaattatcctgcatcatgcccgcctgctccatgttccatgattgttgggagagttggtctcgctgcgcctcgtattgtttccggcgctgcaggaccttgagcgctttctgccggagggcggttttgccgggcccgtcgcgcatcttggcgattttagcctggtatgtggagagttcggcgttgagcgctgcgagcttgacatctatgctggatactcgagtgtcgacctgttgtatggttagtggggtaccttgaggggcggggatgggtgcctttgatcgggcttgtgcgggcatcgtacattgctaatagcaccttgaagagtcggcttggggcctgtggtctttgtgccgaatagtcgattcatgatggtaggttgggttggggtggtttattattgaaaggtggaggtgagggcaaataggcagcggacttgacagcgattccagaccgcgcgaggccagtgcttaataaaaccgcgatcggtgggccgagattgtaattaccaatagctggggcggagcacttctgataaaagctggcaaaatatagaatactggagaatcttgaattgtttgatatacaagtgcatgcgtatgacggatttccttgcacttcttggctttctcttttcgctttagtgctcacctcttgccgcttttaaatcaccgagtaaaactgagcactccctagttaccttgacttgatcacgggccattatataatcagcgtgatctgcccgctcactgaacatcatctaactgagcatcctgatttacccactagttaagtgctctctaagtatagggaggagcggcctaagtaagctatatcaataaaatgcgatgcgctaatcccatcacgtgcaaccatttctatttagatcgcctatcaaaaaaggactggcgtagtcaacgtgaccgttcattctagcggcctcaatcctatccaagtgaaaaatttgcagtagggctattcaatcgacctatcgttttcccatttcagtctatgcttctggagtctctcggaatacttcgcttaccagaccggcgatcccctattcgggctttgcactactaccagggcgagggtgattggatggatttccttgaaggttagaggtccaccctatatcaaagcaactagagtaattagttttaagaaggtgacgacgatgaattacttctctcgttaatgagcgcataagttgaaagcttttctgaacgtataacgtcatgtctttcgcgccatttctaagtaggtcgtaaaccgaagacaaaccatctattactaaagttctaagggcccatggctatttcattttaatcctaggaattctaagaaccacccgttttccctagcatttctaccttagatgatgccattttaaaagaggtacatatgtctagtcacttgctccgaaaacaatggtcttctcattcctccacatccaagttaattttagctagggccatgcgtgccgaggtttctgcgctaggcaggggttcaattccaaattaattagcataatcaacagtataacccccatttctcttatccacagcccttaaaggtcggaaggtgtgatgaatgaagtcaatatatcagtggtagatctaggagatcatgccgcatggactgtgcgctatgcatgcatgcatgcataggacttcagaagctcacgttccgtgacgataggggcgggctgcggccggttctgatcgctttgtttttttggtgcaatgaggtactagtccgtggttagacagaagcggtttgaaaaaaagaaaaaatataacaattaaaccaggaatttttgacggagacatgcacgaagtacaaatatacgtcaactcaaatcttgcaggagccctttagtctcctagtaccattataatctctccttatgtggtggataatctatgaacagcgcccatgtgactgaaggctacttggtcggatgaaaaaagtgctattcaatgttgcgtgccagattccttttaacaaaagaagtgcatttctaatcgaatatcaagtatggaaaaggaaaagaaaagaaacaaacgtgaaaataacaaatgggcttttatacccctttagggacaaagccctattctcgtttcccctagaaggaaggtacgactgcctgcgcaaacgaccaacagtataatcctaaacgggaaagtacgagtcctataagtgctaattgtaatataacccctaggtaagaatacatttagtccctaaatactggcttctcgtcatccacgtggtcgtccaatatccaatcgtcttgcgcggcctcgatccattcttataggcgcatcggtggcccgggcttcgctggataggcatcatggaattccttgatcatctccggagcattcttaaagttacctactgggtaccatacgggatctaggtcgtatcctaaccactgtacgcggtactgcagcttcctataatgctttcttacatctaggatcttttcaacttcccacttatcagtctgccctacctatatcggaggtagcggatccgtgtgttatcctgtaagtggttctatactcgctgccttccgcagcttacttaggttaaacactaggtagacgttaattgactgtggcaggtctaacttatatgcgttcccaaccttttcgatgatcttatagggtccactagtggtataagagagttttcgactcggacagtcctatagccaatccttcgtagtaataaaaaccaggtcgccaataccgaagtcctcttcgcgacgataacggttagcctattgtacctatagttcctatgactttacaatctattcacatatatcttcccagatctgttataactttaagagtcgatccgccgcttcttattcgttatacatcagtcctatacggtcccaattaaaagacattgctagtttataaccccgttcaacaaagaaaggggacctctttgttatatcttacagaagaattgatactacgaaatctactattagtaggtattctaaccagttgtcctagttgtattcaatatacagtctcaatcgctacactataaactgatttacaatttcgctctagccgtctgtctataggtagtatataatagacagtttccgcttaatccctaggattctatagaactctgtctaaaactcagagataaactatccccctcggtccgatacaatggtttcagggatccctataatccgtataacgttatctataaatagacgcgctatctgctttacattagtatctttataataggggattgatatcggtctcttacttagtcgattaataataacaaatactatattatagccgtatctgtcctttaggaaggaacagaaatccatcgataaatgctactatagtcgtttaggaatcggtaataggtataggagactaggcgtgcgatctctctaggtctttatacgtttatatactagacagttgtctatataccgctttatatctgtaacctatcctagctaatggtatcttattgtaataagcttcttaagtttctcgattctagggtatatagttaacggttatcggtatatcttatcgagtaactatgcttaaagatccccttcgtcggggacttcgagatagtcttcaaatagcagtaatctgtcttacactacctaacggggatctgtttcctatcttacagtctaacggaatacttctagcttaaggctttagcggttcgctaactagactcattcggttatatctaagttctatatagtcttaactagtagagggggggcctctgtatcccatatagattctatctataatagggatatctcgatttctaatatcgattttatttcttctccgaaatattccttagggagtaacgtaaggtaccgactgacatctatataagggctttccttctttaaaagaacgtctacaataatattccatttcctaggacagtatttaatcacaaagtagaactataagaggaacttactctaccgtacttattattaattcatctatcgtactattataaaatatttgagagactaataatctataaggatctcgaaacgttctatacaagagagcccttcaagttctagtcgccattcttagagtatacgaatgatcgtaaggagttccttatccctgattttataattaagctctacaggttatatagtctttaagaagaaggcaataggataccaaaaatcatcggcttcgtgatattataagaggatagcaccaatgactccatttaaggcatccgtttctatataggtctagaggtcgggattgtaataccataggataggtacagttatcaacttatactttaattatataaatacttacttacagtccagcgaccattcgtacactatatcatactatataagacgatataacggtttcgaaaggaaactataatccttaataaatcatcgatagaagttacagaatcctaagaaggactatattcccttaatcgttaacagtgtcttccagttcctaataactgcgatcttctctagatctactacaataccgtcggtactcacaataaatcctaagaacttagttttctatacagagaattcacacttagatagtgtaacctataatcctactctttatagttattcgaggacttctctaacatacttcttatattcttcgagtatcttgctatagatcataatattatccacaaatacaactatatagtcgtctatacagtctccgagtactatattcataaatcgctggaatattataagaccgtttataaggctaaacggagtcactttatacttaaacgatctatattaggtacagaatatcataagatcttctatagctagcgttaacctaatatagtggaaaccttggcagatatcaagctttataaagaattttgctttactcgttcgttagagtactttatcgataagaggtaataggtaacaatctttccttataattatattcaatcttcggaagtctatatagaaacgtagaccactacctagcttcttcactattaagattagtaaagcatacagagccgaactaggaataataaatcctttctcaagattatcgagaatatactattttacagcttttagtttatctaacaataatttatagagtaggcagtatcctagctatacttctacttcgaggataatattatagtctacccctaggcgatacagtagtagtttattggattttttcttagagaatacttctataaaattgtagtactcccgcgggagggtccttttaatcttatcgagttctatatccttctcaattgtagatttaatatcaataatctaatcaatttcacagagtaaggtctaaaagacttcgacatctttattaataaccatttgtattcgtaaacggttaaatcctacctaaccgataatactaatatctattagtagaagaacttcctttatttcttcctctagtatctccgttcaaagaggtactagttcgatttcgtcgttaaggttccattctatcttacactactctataacttgccagtacctatattaatactctcttataacagggtatagcttctaagtctttaggtcctaccgcagattacttaaggcttatttttcgaagaggcgatcgcatcgttctatatccttctagtgatccggcttaatttatacagaccacttaaggatcattataggtacgggtacagttaactagcctactaccttatcaaaaagggtattcttatctagccagattatacgataccgtcggcagttaaggaggatatcgttctccgcgaaccacatatatccgataatcatattatatcggcctagatctactactagtataggaatctactactagattcgatcgtctatacttagcgtaagaacgacagtgtatataataggtcgtaataatttactatcgaatcccctaactaggcactcgcggtctagtttataggtatataacccaaatttcttactaagtagtataaccagttctatattaataaatattaaactatctactctagtatctactagcgctaagattataaaggaatatctattataagtcagtcttatattaaatactaagctatctcgtagacctcctaaaagcttatatagatctagtgtatacagtgacacctattttctacttaggattaagacttctcctaggctcctacttttcctaggtctacgttatcctccaattcttcgagttcggttacacgcgattagttgtaggtctagttagtcgcagtaacagcgcttacagctatatttatcttcttcttcgggcactcgaatattatataccccttttccttacaataaaagcatcgaccctcctttataagagtctctcactctatggctaatagtccagataataaggcagtcccttcacgttttatatacagggtaaaactagactagttagcagtagtcccaactccgcttctaaacacagttattatataggtacatacggtaccctttacttcctattagagactaatcttataggacatactttagtaactctaggtaaaggtatcgaaaggaaccgtttcctaattaatagcctatataacttaactctgcaatagatatagaagtttcgaatataggttacacttacggttttctttaataaccgcggcttcttccgtaagctacataaatttagctaagaagtcagtaaagtcttccttaggttttatcttaagtttataataggccgtatacacttctgtacaacgatttaggttcgcaaagacagtacagaggtagacaataatatcttctgtatcggcgtatagattatttaaggtcacacttattcttaaggcaatatacagctatactttgcctttatatcggctttacacatatagtttccggtagactagtaacaggtaatagtcggcatttgctttaagcttctatctaataactatctcctatatttcgaaacggacttcctttctatcctttaacattagtatatcgggtatcttcatagacttctaactaatgactcctataatcggtatatcacttcgggcttagttcgtttcgctctaagtaagaacaaggcgataggcaaggtcgtcacacttacgtatagcgatatctctataggcggcagccttatcacgttcttcggtagcttggttacattctatcataagacaatctttctctatatagagtcgatcacattcttctataatttatctaacagcttcctcagacctcccgttctctaagatcaagacctagatttcgttatatatcatctggttatcatcttcgactatttggaaccgattagccagctcaaggaattgttccttactaggagtcgtgtatataatcttatagatagaaggagtcgaaggaccctcctcagggctatcgcattcaatattctcaattagatcctatatttcagtaggagtcggggttttagggttagcagcttcttttgtgagacaatccggtactacgggttgttttcccttaccgattgcggcgatccgttgtggtaggactatgactggtcctgttctggttggttttaggatgggtggggtgaaaccagactaggacaaatcgtaatgattatctgtgcagtcgtacggcttcagaagtttgggtttgggatgatacttgatattatattgcgtgccagattccttttaacaaaagaagtgcatttctaatcgaatatcaagtatggaaaaggaaaagaaaagaaacaaacgtgaaaataacaaatgggcttttatacccctttagggacaaagccctattctcgtttcccctagaaggaaggtacgactgcctgcgcaaacgaccaacagtataatcctaaacgggaaagtacgagtcctataagtgctaattgtaatataacccctaggtaagaatacatttagtccctaaatactagcttctcgttatccacatggttgtctaatatccgattatcttacgcggcctcaatctattcttataggcgtatcggcggcctaggcttcgctagataggtattatagaattccttaatcatctccggagcattcttaaagttacctactaggtactatacgggatctaggttatatcctaaccactatatacagtactgcagcttcctataatactttcttatatctaggatctttttaacttcctacttattagtctaccctacctatattagaggtagtagatctatatattatcttataagtagttctatacttactaccttttatagcttacttaattaattgtgacattcaatccagtctgaagcaagttcgtatgccgatgtcccggcttatgcaattgaaaaagatacgtctatgctataagaaacgttgcgattcgcccgggaaaggctcaatgtgctctaccatccgctgatcgagcccactctttttccctgaatataggagccaagactgcgtcaattgttctgtgtggggcagggccatacgaagaggggggagattcggaaaatcgcaggtccttcaattaaatgagcaattacaaatagccgagttcgtaggctgtagcattgggcagctatagcttcacgtagtagcattcttcaaccgagataactccacgtaagctgctcaacatcccaaattgttgcgtgcttgtgtcgctattggcttcaaaaggacagtttgctgatctgtcgggtggacacgaagatcttgatattaggatctgacgctgatctcaggtttagcctcggccctgtctcattaccggctcgggttggctcatacaagaggagaccattttggatcaagttattgagactgcttaagaaattccgatttagcaagacagcggtacaatagaattagaattcgaaatcgaaaacagattaagacactcacgctttctttcccagcgccccactccaatcgtactaaactgaattcgaccagggaaagtatgtatttctggtggatcgtcaaagaaaggtaatactagtaactaaggcgaaagtgggagctatgttaattctgataactagttgcacactaaagtattccacaagcgagtggccacccccaaatactatagtaaatgcgatatattctacatttatatctaaacagccgtatgtttatcctatctccccattttccgatagttataatatatcgtatttactatggtctttggggatggccactcgcttgtaaaataagttagctcgacccatcggcgcctaatcggaagctcaaaccagaagtactgtactcttttggaaactgtctaaagaaaatgccacagcaaaagaacaagcggtctacggagtacgaagtttcagctggccacgaacagtggggccactttgtagtagctcatggcgtcccgaacccgcacgcaacaacgcaacattatctggttaaagattctgattagtcgccggtcgagttatttcccggctagcctgatcaactgaataatggggtttcggttagtgtagtgagtctacgctgtagctggctcagcccgctacataaatatgagaccgaatctctcacatatgaactagatacagcttttcgcgctttccttttataaatcgatagtcaattctaccacaaggaaaatgaagatttgtttgattaattcgtcatacgaaggagttgactcccctttcgagaaggtatgtctaccctattgaggccttctcccagcatctctaacttcaaaacagtatgatgactttcccgaccctaatcggtatattccaaaagaccggcatgagtttttcactcgttacgtcaccaagagaaatgctgaggcggagattgacgagatttgcaaagaacattttgatatgttcatgaattacatggtgaatcccgacttttagatgccctctattcctggactatacttacagatctctttttcagtggggcatcgaaaccgacgatgtggcaggagttgaagccaccagatacctcgaaaccaagggtgttcccatcctcaccaacccatcgacatttctagcaaagaataaagtcgatctccagagggccgctgagaaaacaggtctccgtgttcccgaaaacaccccagggaaataccccaaaattgtcaagtactctgacggatatggttcgttgagtctggatgaggcatcaatctgctacacggagaaagaagtgacggatcgcgtggcccttttgcaggagaaagaaacaccctttggcatcatcgtccaggattatatcatcggccgggaatgttctgctatagttgtggaaatgggaaaggaggtggtggcattgacaccgctgcaatatgtctttccgaaagacactcccgacaacgaagccttcttgacgtggtataacaaattcgaagctgttgataaaggcaccatcaaatatgcatttgtggaagagcagcctcacatcaaaaacctccagaatgcggctgtggacgcattcaaagcaattggtgtcagcggtggtggtgggtgggcccgtgttgatatgcgtctggaggaaagaaccgggcttgtctacgtgattgaagtcaattgtatccccgtggtcttttacccaaagggaaacacacttggtgatgaccttgttgtgggagagagatttcctggtggccaggctgcattttttgacatgttactagcgaccaagcagatgcagcttgggtggcaccgtgttcaaaatgctcatgtcgccgaggtttacaacaaatttgccccctcgtaccattccgtgtggagcaattcggagctctctgagatgcaaaagtaccttactaccaattgggactattcgggtacagttcttgatgttgcatgtgggactggtggatttgggcagtttctccatgctcaagggatccaagccgaggtgactggcattgacctatcacccggcatgttggaaaacgtggaacattacagggaacttcgagttgggccaatggaggagcagatcatggtatgtgcctttggaatacttgttttgggaaaaatgaatgaagacaaagcttactttaatattagggtgctggtgaatatgaccatatcgtatgctttggtgccctccatttccttggtcctgtctacctcaatgctgtgctcgcacggatgtttatgcttgcacgcaaatcggtttcgatctcggtagacgacgtcagcgacgaatatatccaggcaatcaaagagaagcatggtgaattgacgtttaatgccaatcatgtcaaggccattgaagagttcggaattccaaaaggatggaaacgagtctatcacgagaggaggcttatgtattcttctccaaccaatggagagatggtttatggatatgggatgcgctttgagagagcagatgcctagtatttcgatggcttttcaaaacctgcgtgttgacataatcccaatttcacaaactttgacatcattgaaagcatctgccctatagtcaagaattatgccaatatcaaatcttatatctaaatcgagcctcgaaacaaggggttgctgtcaagtagcttggcagaatggtaagtataatttcgaccttgggagtcctggacattttgctgctgttgcttgcttccatttttcggccacttcacatggctaggattaatagctagagatagcctgcctttgctatttctacgtgtatgacggatttccttgcacttcttggctttccttttccgttttagtcctcaggccttgccgcttttgccctcaccgattaaaaccaagcacgacccttgattatataggctcactgatctccgagggctgcaattgagcacacatgtacttcgtacctgaaacatcgcctgatttgatataattttgaggtgcctcggctcggatcttccttcttgtcaagtttggccatctttctggttgggctcggtaatgatctgcagtgctcaatggcaacattgaaaaggatatagagacaacattgctcgaattgccattaataaacaatcgatggtccataggaccgaccactactgacattgcaaagcccctgaaaatgcattcatgattaccccgtaaatagtagaaaaataataaagggctgtgcgttggccgatcctgacagttcttgctccggtgccggcattgtcccctggcatatatatctagcttcattttccgctacgtgatgctttttgctgcggaattgacgaccaaggcctcgttcagatccagttcaggagcttgagcttgccactcctgctctgacgcctcggtaatcgttcttatgacctttgttttggtatttaaagaccacagatcagcttttcagactcaacccgtgagcatttgcctcagtgaaagctggagctgaaggatatgcttgagtgagggtggctcggagctgaaaagggcgccatgattttgccctgatgaacagatgacagttgggatctatgcttgcagttcagtatgagacacaagaaggagtggacatgggatcagcccgagtggatgcctaatgagcgggaagtagctatgtttctgagcctaggccgtactttgtacatcccatgattgctgtggagacttctacagatacagaggatacatctgattcgctatcctggttgatgataccaactgtagatttagggttactccgctcggtgggccgatgcttcatacttcatgtctggttcgtcatatacgcacatcgcttctacatttacatagcagctatataattatatgacagtggaattgttttatttgtcttcgtccttggctatagacaaagtctccgatagctacaccccgggctatttaccgataagtgcccagctagctattaaagcaaagagatgaagcaatagacgtgaggtcagtgtccagaatggccggcgtggcaccagtatccgtctgctgccgaccggaaatgtagtgcaagccgttgaaaatactcgcggagctccttttcaatgttatcctaggataacccagcaggcagcggcgaggcaagaagagaaaagagcaaaagttcggcaaacatgatgaagcataagaactagaagaaagaaagaaagaaagagagaatgatagatatgataatactacagacaacaggtctctctctaataggtttaaatgtcgctgaactgtacggagtagttactctcctatgaaagataaatgcttggaatcaaaatgagactacaatgcaacctactacgacatatactcgggtttcttcattaatctgatgcatagaatacccccaagatgcaatatcgttcgctacacccttaaaccgacttcatcttagcattttaaaaagactaacaacatacctggtacattcggtattgacccatttgggtaaagattgtccggataattattacctagataggcataatcgaggcggattgccctttcgggtttgggcgccgcacggttaaaagctaaaatcatattttgtacaacggaactcaaatacgtacgctcgcctggaaatcaacggcggcgagatttctcttgttgtcacccttcggtaactagagtggtgtgtgctttttcatgccggacctaccgaaggatcaaggatcacccgactggcttcgtggactggttgcagataaagtgccttgccaggtagtgatgtgaatactgagcgaacatatgcaattggaacgctggagcatacatagctgtgcgcattcgtggaccttaatcgcggtctataggaatgttgatatagatcatcactggaactacgcgttcaattgcgttgatacgactattagtggggttgctacaaatccaccttctcccgcttgtccatatacacgccttgtacaacggcccctcgaaaacgacatgatctatgattctgatcgttggacaaggagatcagctcccggaactatctatgagcaacgtcatcgatgcctgaggccataatatacacgtggtcgtaaagtacattcaaagttatcccaaatttagcttgtttcaccttagtggagaggttattgccatgggaatatacgcatggtatggagcagaatcgtcagatgatgtacatggaggactatccgggatctagatccttgtactccgtattcgtggcagtttagttggctacgtgggacaggacactgaaggtatctgatacctgacttgatacccaaatctggcggggaagggctgtacccagtacccactgtaattttgatgcaacgggccccatgatgagatgagatggaaattaaaagcacaggcgtagataagtaagattaagcgaaaagcacttcataaaacccagaactacaaagtcatctatactcatagatcgtgcagttcattcttatctggtggttttgatccccgcggtgattacatacgtgtttccgcccctgcttctacagggctcgtggccatcagggatcggtaatcgatcagcacagcttcccccgaagcggaacctttctttcttctctcttcaactgctttctcgacggacagatgttgagtcgccattcccgtctctctctctccgtgcgtgtgcctagagtctgctcattttgactcaactccactcaccccatttcttcatcttcccctccccaaacccacagggaggttcggatttctctctttcttcgtcattccctcgggattgaaggtatgctctatcaagggctctgacttctggtctagtagcttctataaatcctcctgaccagatcctccaactccgtctgtcgcatcccggtgaaggcggcctgcttcacgggtacacacatcatcgggactgctggtgatgcaagcgggtgaacctcatggctaataaattctctattcatacagcgctagaccgcttcaattttcaatcgactttttctccatctccagtcatttatcggccgtgacggtcgagagcgtaccccacccgacctgcgcgacctggtctgtgttctgtgtgtggacaccacgcttgcttgccgctgtatcggcctgtcgcgcaacctctcctgggcacccgatctttcgaccaacccttgtaccatagactgctccgttacgacatctcggagacgaacgaaacgaatccatcttatgaattatttccctcgggtatatactccatcatgttttggcgctttgggggatatgcgaatctttccaccatcgataccctgctcgacaaacccgatctcactcttgaggaactcttagacgagcccgaaactattcaagaactgaaacagcttaatacgaaactcattgaatatctgcgcgaggatcatgccttgaaacggcttatggaatacgtcacggcaccgagcttggtgaatgacgacgaagatgatgcgaaagacacttcagagaagggcaaggatgatgccgcttctgcggagcagacagatatggacgaggagaaggaaggggatctgagggatattcttgacccggatgacctagacaaagtcgaaaagaagcgtctgacgcatgcctatatcgcctgtgagattctctcatcagagacatggtccatcctcgaatccatgatggccaaccctgcatacttgggcgaattctggggtttcctgcgacgacctcctcctcttgattcattgcaggcaagctacttcacgaaagtaaacgagactttgcttgataaaaagaccgacgagatgctggagtttctcaagacccttgatggaattgtcccagcattgttgcagcatgttgataacccgatggtcatggatcttctcttgaaaattatcagtcttgagaaggcagagggtggccagggcactgttgactggctcagatcccagggtttgatccccaatcttctgtctttcttgtcccccgatcgtccggcgtccgttcaaacctctgcaggtgacttcctgaaagcgatcatcactatatctgcaaacgcaagcccgaacgaccagtcatgtattggtcctaacagtttgacacgccagcttgtctccaccgagtgcgtacagcagctcatcgatgcgatgctcaagggtggcaatcccctgactgtgggcgtgggtattgtcatcgaggtaattcgcaagaacaattccgactatgatccggagtcccttggcggacccgatacaatgctcaccacttacgacccaatctaccttggaacgttgctgcgtctcttcgctaaacatattccccagttcatggctctcattcaaagttcccagcacactattcatgagggaaataagctcaagactgttgagcgaggaaagttgaactctgcttggggtgggcaaattgagcctcttggtttcgaccgattcaagacgtgtgaattaatggcggagctgcttcattgcagtaatatgggtcttctgaatgaaccaggcagcgacgagtatgttaggcaacgagacgaggagcgtgagcggttaatccgtgaaggagggttcgatacgcgaggcttcgatacacaccaagatgagcattctggagttgataccgcggccgattttgcgaacgattcagccctcgattctggatccccagaagatgccaaggtcacagaagtgccacacgtgggtgaagatgacggatttgaagatgttggcgcatctggtgatttagtgagtgcaaaagctgatgccgacacaacggctactgcaaactcgcagccgacggaaacggtcagcgaaacctctccatcggaaatcacagagccagagccggtgtcttccgaagaaaccacggataaatctgaaagttccaccacacccattgatccctcgtcgcctactactggtctctctgatcaagtcagcgccatgaatcttgaaagtgaaccacaagacgagcagcaggagcctggaaaggacaaccaggagcctgtggcttccctctcccaagatgttccagctcctctcttctccaaggaacaagcatccgagtcagactccgccccagccgatcaatcggaagaaccatctagtcttattgaacaggtcgaggaaacgagcgttccgaacgacggaggcgatgaggactcggccgaacaatacatccaactcgatactgacgggcgacctgtggtcggcgattacctgaagatccagttcgtggagaataaagttgtcccaacgattctggtttgtatttcttttagagaacgttgaacacccacgctaaccattgatagggcttcttcttccgcttcccatggaataacttcctgcacaatgttgtttacgatgtgattcaacaagtctttaatgggcccatggagcgtggctacaatcgggcactcgcagtcgatgtatttgacaccggacgaatcactaccgcgattgttgaagggcagaagcgcagcgatgagacccagcggactaagcaaatccgtctcggatatatgggacaccttactcttgttgcggaggaggtcgtcaagttcagcgagcgtcatccgccagagttactctcacggtccgttatggagagcgtgttgaatcccgactggattgagtacgtcgaacaaactttatcagagactcgcgaacgcgacaatgctattctcggcggtgttcgtcctgatatatcggttgggcctcgccagactagccttaacaacaccaactctggccaaggcttctctaactccgctctggcggacgtgggattgaatggaggaatcggtggctcaaccttccagagtttcgacctcggccaaggaggtgtttccggtggagcattcggcggaggtggcacctcccttttgagtggctttgccagctcaagcgacgacgaggacgaagaaatggaggaccaggacgagagagactccggcaatgccgatcaaaatgacaatgacaatgtgggttacctcttccgatggacatgatggtgcacgatctcaaccgattccgtgcatcccccattatcttcaccattccttcccggtttacccctcatgtatcccaagctatagcaagggccaaagagccagaattccaggtaaagtgctggatcgctagtgcttgggcaatgtgggcttgactaaaactggtatcatgcctgttagctgatgttcattgccgatatcgtgttgcaaatctcagcccaggggaggggggattctcgtgtcactttgtcctgaactgggtttcttatgcacttttccctttccctttacaaggaatgggctgtcagatgtattgtctttttactaactgactttctattaaggtgttcacaagttcagccagtcaacctattcctatcttacccccgccacctgctccattgagcttgggcccttcccgcgcacgccgtcagttagccgcacgtcttgccgctcaaaagcaacaaccatcagaaaatgaaggcgacggagattacaggggggccgaaggaagtgaggaccgagagtcagattggccggataacccattcgtaattgcagggatcgatgaccccgccgacgcaggcagctctgcgttccctaatagtgactttggttcagccgatggcaaacactcacctaccttcccggaatcaggattcagccctccagactcgctatcaactaactcatctgaagatgaaggtgatggccacgcagaatccgtgaggcgacaggttcgtgtccctctagaagtcgaggatgacgacgatgatgaaatgggtgagatggtcgggccgagtggcattggcatgatggactccgacgacgaagacgaggctatcataaacgaatctcttggttactccaacctctcgggccccgcccgatacaacaacttccgatcacgagccgtgagctcccattatgatgatgagcaaaacgacagcagtgatggcgaagatgatggattggtggagataatggtccctggccgcaaggcctcgacctcgaactaagcctgggctctttgcatttgatttcgtggccatgacggtaaatcccaacggcaaaaaccgtgggggcgagtcaccgttgcggcatggcgtttgtatatagactttccatcgatggagtagccatggggttctgcatggagagctttctgatctgatgtcttatttgtgtccttgcatgtattcgcatgctacgtgcctgggatcggcttacgagtctgtggcttttgattggtattcgcttgtgtacgatagttgtctggagaagcgaattgatttattttgagcaaatagtaggaaagcctatatcagcccgaaagtatcatttcgtagatcattcttataagacgcgcaaaaaagaacgttgaatctctcggagaaaaaagcgggcccccaccatcccgcatcaattcttctcaggactttgacacaaccaagtcggttcattcttggataactttgtcggtagcaatcagtcgtgcctgtgagaaaatatatccaacaaaaaaaaaagatacacttgcttcaaaaatggcagcttcctcggagtaagtgcagtctggagatacgtcattcccaagcgtatatctaacacaaaacagacaagtcgatccaagtttaaaagctcacacagagctagtgaactggttcatccagcatggtggcacggtcgataagagcgtgcgcattgcacaagacgcctcgcgcggcgtgcacctgcaagtgagagcagactggccagaagccatccgaaaagagacccgagtgatcaacaccccaattagcgtgtcaatgtcctggtacaatgcaattggctatgagtcaccacggggctcattccccaaacacggcgttgactttccgcggacatggatcgacgacgtcgggccggaggagacttttgccttcttcctcatgggccagtatctacgcgggcccgacagtttttggtatccgtatcttcgtaccctgcctcagccgggtcaattgactaccccgttgttctttggtgaggaggatgtagattggattcagggtactgggattcccgaggctgccgttgagaggattaagatatgggagcagaagtatgattcgggctatcttcagttggatgcaatcgaattcccggattgtgagcagtatacgtggtgagtacgagatactgctgtctctgttattctgcccgaggatgacattatgctgatttgtatacagggagctgtatctctgggcttcgactatcattacctcccgggcattctcgtcaaaggttctatctggggctgtcgagcctggtgatcttccagaggatggagtctcggcgctgcttccgctcattgaccttccgaatcatcgaccaatggcgaaggttgagtggcgagcgggtgacgaggatattggtcttcttgtgcttgaagatcactcggcaggccaagaaatttccaacaattatggccctcgtaataatgaacaatgtacgtatcccatttgccggggcgtgatatccgagccttgagaacgcctgaatcatcatagacactgaccatatgatagtgttgatcaactatggattctgcattgccggcaacccaaccgattatcgcattgttcatctgggcgtgaagcccgacagcccgctcggcgaagccaaggctcgccagctcgaactgttccctcaggttgccaagaatatcgaggaccactattacatcttcaatactttctacccactactggctcccgaaacaacgatggagcactcgatcttttcaccggcattgttcaatgcattgaccgtcatggaatcaaacaaacgcgagcgcaaatcactcgagatcaccgagagctgtattcgcattcttccgggatatggaaacaaccatagtatctatgctgcactcgctcagattagcttcgagctcatggctcatgccgcaaacctgaaagccagtgcggagcatctgcctttgcagccaaccaccctgaaccagatccactctcagatctaccgcaacggccagataacattagaccaggctgctttggttatcgctacttggactattgcacgcgggagggaacataagcgtggtgaaagttgggaagataccaaggtcctcctacatgaagtaatggcacgcgtcccggccggccttctctcagacgaagtcatgtcccggatccgagtgcgtatcctagaacgtccgtccctgatcactaaaaatggtgaactgttcaggttaggcgaacttttcagccttctgccggctgaaatgcaggagccggctcagacatgcttccagcacgccctgggagaggctagccaggccgttccgagtatatccacagatccacagaccctgtttgcaacggttatttgcttgctggttgcaacgtataattcgccagaggcacggtcaagattgtcctcgcgtctcaaccgatggtttactttcctgctcgagcaataccctctgccttccagatctattgagactggtgtggatgaagccagcgaaacacttcgtcaattccaaagatatactacggcagcacaaccaagctcatgggcacctggtgatggggttaattggcttactgaggacagcgggtggttggactcggagtggcttcaatggtcatggacggtggcgggctcagaaatggtgatgattcctcttgatccatttgagatcctcaagatggagggatcattgtctatgttgaaacaggcatgtctctatgtaccacaagagtagataaagaggaagtagacatagaaatgagcgagtcgtttatggtcttcgttaacaatcctctctcttaaccccgataaatcgagaagaagaaaaaaagttagaatagacgttcaagaggaatttcgaacaaatgctagagaaataggctatttaactggccatatctttatgtatatggatcacgtgatatggcatagttataccatcctaatgtggaattctgactcagcaatattgtcacgtgtgagcatatcacccaatcatatcgagcccaaaggcggatcattcagcaagcgcaggaattgccgtgagctccacgactcccttcccttctactccacgaccctttgaccctcactacgcattgtcacccccgccgtcatcatgatatccagagcggcggctccctccacctcctccctctcccacctctcgatccgctccctccgcgctccgggggcggcagcccgctccttcgcatctgtgtcggaggcgcctcccgtgaagcaccatggcggacttaaagaccacgatcggatcttcaccaacctttacgaacatcatggaacggatttgaagtcatcaatgaaatatggtgattggtaccgcaccaaggatattattttgaagggtgatgattgggtgggttgtcgcacaattgacgatctggggaattaccaattgctaatcccatgaccagctcatctcagagatcaaggcatccggcctccgtggccgtggtggtgctggtttcccctcaggattgaaatacgtaagtggcccacacgcaattcggacaaataccagtgctttaggataaccgaactgactcgctactcgatagtcgttcatgaacttcaagggttgggaaaaggaccctcgcccccgttatttggttgtcaacgcagatgagggtgagcccggtacttgcaaggaccgagagatcatgcgcaaggacccccagaagctgatcgaaggttgcttggtggtgggtcgtgctatgaacgccaacgccgcctacatctacgtccgtggcgagttctatcacgaagctaccattctccagcgggctatcaacgaggcctacgcggctggtctgatcggtaagaacgcctgtggcactggatacgacttcgacgtgtacattcaccgaggaatgggcgcctacgtttgtggcgaggagacctcgctcattgagtctattgaaggcaaggctggcaagccccgtctcaagcctcccttccccgccgcagtcggtctgttcggttgccccagcacagtcaccaatgtcgagaccgttgctgtgacaccgaccatcatgcgccgtggtgccagctggttctcttccttcggccgtgagcgtaaccacggtaccaagcttttctgtatctccggtcacgtcaacaaccccgtcacagtagaggaggagatgtccatcccgctgcgcgagctaatcgagaagcactgtggaggtgtccgcggtggctgggacaacttgctcgccattatccccggtggctcgtcaactcccatcatccccaagtccgtggccgacaaccagctcatggacttcgactccctcaaggactcccagaccggtctgggtacagctgccgtcattgtcatggacaagtccacggatgtcgtccgcgccatctcccgcctgtctaaattctacagacacgagtcttgcggtcagtgcaccccctgccgtgagggcagcaaatggaccatgcagatgatgcagcgtctcgagaccggcaatgcccgcgagcgcgaaatcgacatgcttcaggagctcaccaagcaggttgagggccacaccatctgcgctctgggtgaagctttcgcctggcccatccagggtctgattcgccacttccgtcccgagctggaggcccgtatccgccagtacgagaaggagcttggcggtgctcccttcgccggtggctggcaccccgacagccgtgctgagggcaagttgatctcccctggcatgtaaacgcacctcccacctttcgtttttccatttacaaccccttttctccctgtgttgtcccctcaaaaagaagcaggaacaggtcgaggatgattatcgcttctagatccctcttatatctccctctccctggccggtaatgttttctgtctgtctggtccagccggggagggtggcgtttctcttttctttactcagcccgatcccctcgtattcatctatcgcgcctaggtttcctttattgtacagttggtagcaaatttgatgcatttgatgtcttcattcgttttatgtatggcgggttttgggtccatcgtgccaactggatttctggccagaaggttaaccatctgccatgaatcaacattgatatatctgtagtctctcaaaggcctagaaggagaatagataagagcggaagaggatctaactaatcgacgctagaagtcctagatattgcaaggtaacaatcttgattcttgataatagtcactatatcgcagccttcttactaccctcactagccataagatagtgtgttacgctgtcaagctactatatctgagaaatgtcgaagtccatttcgatgctccgacaagaacgaatcaacgtttctcttctcacttcatccaactaaccgttgagcaagcacttgacaaggccattcgcctttcacattcacagtctcgaatctctcaaacccttgagactcatagtactggatcaattttccatcgccacccgcatagcaatctacccgtagtaaagagaccccagccttcctagcaagatcacgcgcatggtccaagagacgtctaccaatctgactgccagcacattgccgatccgtgactaataaccgcacgtaaagctcaggctcagagacaggtgtcacatagggcattttatccccaagagcgagcgcaccgacgacgacccccggctcttctccgttcatagtttgggcgagccaaagaccatggccggttgttgcaaattctttgagttgctcggcgcgttgtgggttctcggaaaaggatgctgttccccattgcccggttctgttgtgcgatactagccattggactgcggtgtctagaagatggaggactgccgggacggcgtctgctgttccccgcacgatagttatgtcgtggactccattcttaatcgggcttttgagatttttgttagtatctgtgagtggcctttcgcttttgttcttcatttgatattggccccttccgatctacctcttctcgggtaggttggcgctttgaacaataatacttactttgatgccattatccaagcagtctgaagggacgattgttgtaaaatagcctcaataagctcaactagttgaacttttggggggatctttggaaattgtcgagtgagaagtcctactgtacatcctggagcggagataggtaaataaaggcttggcaatgacgtaatctcactgtgcattcatgcaatcgcaggaatgtggagatatgccgcgagcgatgtagcatatccccattttctccatttccatcaagcgattaataggcgaatcaattcagtaacaacatagtctctcacctcggaatatcagagcgatgatctcccgtcttccgcttcactccgttcttctaggttcttcagcgacattagcatcattagcaccagcaaccaattcctgaacattagtatccttctgttctctcccatcggcctttccttcgatctgaatctcagcagctctcgcatccttctccatcttctgttcgatcttgagcaacctcttctctctccagcccatcccatacacattctcaacccagagcagccccattccagcagtcatggccaagcccaagaaaaagaaacaccatccccatcccatgccacttagcatttggctaatgaccgcggcaccaacagcgccaaggcagcagcgaacaaggttgcatgccgatgcagctgtggcaggcttgtctgggaataggtcgacaagaagggtgttgaggcagttcagggccgcaacgaagcagaatcctataatgaattgcagcaccagtggagcggctaagtgtactctttgctgcagcacccacccgtacgggatgaatgctacaacgccgatggccattgcggggaatactgtttgcaggcgagtgtgctcgatcggaaaactgcgcaaatcgtcccctttctggcggttcactggaaatccgagcttttgggctgtccgcttgtagttgtagtcaatgacttttccatacaggactgcgccgaggcaagagcttaccccgaggggcctgcgagtttgttagtatggaccccggggtcaggaagatgaggcagacatgaagacttacaagaaacagagcccaatctggagctcgctgaatccatacaggggaccaaagagattaggagtgcttgttaacagagcgatattcgcgaacatcacaatcccgacgtacgagatgatgatcaaggcatcccactccagtagaatgacaaaggagctgagaggattcgggaacctaagtctcttagtatgcgaggactgttgttgcgacccttctgcatcagtttgcctttcctcagactgtgtctgcctcttcgaccaccattggataaccgacctgcgccaccactcgttcggtactgcacggccgtcaccaacaattttgcgtgccgtctccggcatagtaagcacatagaacaccaagtaccctccactaacaatgaccaggaaccagaagacactgcgccagccgaggaatttggccaaaagaccaccgataacagggcccagcgcaggcgcaaccataacacctgcagccataggcccgatatatttcccacgctctgctgttgtcgtaatgtccgctataacaccatatccaaaggccacggtgccgctgctccctgcgctctggagacagcggaggacaatcaacgccgcgaaactgttttgtaacgccagtccgatgttagcagcggtgtacactgcgaacgcaatgacatatgctggacgtctacccccggtgtcggcgaatgtgcccatgaagctcgggactaggccttggaagatcatatatgttgtgactgtcaggttgatcagctcgggtgtaaggtggtaattccgtaccaatgttggcatgaccgggtagtagatttgaccggaaagtggggagaagaacgacgcaagagtcaccatcatcacgatgaatgacctttcgtatttgctgaatgccgaaaatgatggctgggaattgtccggtgctgtttctgtgctctcgatatgtggctcggtagctggcgagcctgagtcttcgggttgaatatggtcgttgttggcatcgctgggggatgtatgtgtggttggggctgcgacgggtgcttcatcaaacccgccatatccactatcgactcgccttatattgcgatctaccggggtgtgctggaagggaccaggtactgtcactgtctttccctcgcgagttccttcagtcaggtgcagctccatgatgaatagtgtgtaataagccggatagaatgataacaggtggatatgagagaggtagagaggagagaagcagcaaagtaccgaattatactccgtgactctttcttgagtcgtactttccccaaagtgtcgcacaactacgttctatggtttattgcaacccattcggaacggagtagctaggcttcttttatactatccaaatttatgtatcactttgcaaggtgtacggaactatttagcatcccagagaaagtctagcactaaataaaaaccactttgttatcatctttatcggtcttttttgaggtcttttccacggtcctttagaatgaataattaccccctggtattatagcacttatttttgtcacaaatgtaccaccgacctcattgacttgcgaaactccatgctcggggatcctacttctgggtgccctaatagaaatatgcagtacgatagaacaggtgtaatttcacagatagttatgtaattctctaagtcattaaaataatgcaaatacaattgaataataacaacattcacttttgagaggttcgatcgcgagtacgaggtgcctatgcgccactgttgtgatatgaggctggtgcagatcagaaatcaagccacaccatcggaataaattcccacattgcctatgttgtatacgaagaaccaaaatcgaaaattaacttgatctactcgttgtatatataagcttagttattggagtctaggttgtgcttcagtgtactcatgtatagcatcattcatgtctaatacgagagattaagggaaccggacttgtgcactagcaagggggatagaatacagatgagacagatagtaaaaagagcagaacaaaagaaaaagatcagtgcttgggcgttagatagttagtgcccgctaatttcacaatgaacataggcaaactaggacattattctccttatttcctcaagacttaataaccaccagccatgatgacgccgtagtatcgacggctcatctctgcggtctgcaaaacgcgagcgtcacctgtcaagggcaggcccaggacagcggaagattcaacggactgtaaaaagacggaagtcagtaatgaacgaaagcaatatatcagcggaaaggagggagggaactaacatgaacatcttcgtgtgtaatccagccggcgacagcccggctcatctccttgaatgcaacacgctcctccagtccttccagactggatccctggacacgatcgcccatcgcaacaagagcgttcactaggcggttcaggcgaattggatcacgtcggccgctggtggagttgacaaggcggaggaaatcttcataaacgccgccgccagaagaccagccgcgcattttacgctcaggcgcgtcaccgaagccggagaccagagtttcgagggtacggtagtcgccctcgatgatggtgcttgggccgacgatgcgacaaaaggtggtgtgggcatcgttccagtgcttgccgcgaataagacagtctacctcacgggcagaatcgccgatgtcgcgagcatacagagccttggcaacccagatccaggcttcgggaagctggagatcagtgatgagatattgccatgccaggtcggaggagccgtcggcagcgaagggctcggggagttgagcggcgaagcgggcgagagtttcttggacagcgccctttcggtcgttaccttgggagaggtgcaggaggacaaacaatgcttgatcaagctttccgcctgcactgagttcagaagcaaaatcccggacgagttggtcagtttggtgctggttgattttgatggcctggttttttccgactaccgcagcgagaacgtggtgtagctggaaggacagtcggttggagagacggtcaccggagacggattcgggaaggaaagatgcggggaattcaacgggttgggtgacgtggccttgaatcgccgagaaggccttgagcagaacccaaagaggagattcgcgcccaagggtgtcagagccaggctgcgggactgcacgggtactagcctggtgcgatgggtgggggaaggcgggttcttgtccggtggccaagtccgcaaggaacttggagacagctacctcgattggctcatcttcagccgtgcaataccacagacgaagaccaaaggcctggaaccaatctaggtcgaaccgctcggtgaagccaaagctggaggcccggtcttcaagcgcaccgcccgatttgccttcgctgcggagagcattcccagcgaccagttcgtaaagggctcgtatgggttcagtcatctccgagagtatgttgttctgacgccacacatcgatttggttcgctatgtcggcacgcgaggtagcatcgcggccaatctgtgcgactatagtcgccagatggggattttgactgtcaatcagtgtcttacaggcttcctccactcggtgcgaacagatcaaatgaacggcccgttccacaggggagcgaattgcatccaggttttgggagtgcttttcacgaatgattccctcccaaagacgagtgagtcggtccttcctgatccggtgcgcaaattgctgtcgtaggcgcggcggtacccccgctgagatatcgtcctcaatatcatcattgaaaagaatgttgagaagctgccacaccaagcgctcttcttccgactgggaacgggtggatggtgacagagggaactgcgacaggtcgatcctggccatacgaacgaaaggggtgccatcaatgcgctggatagaggactgaagccgctggacatcaagcatttccctgacctgtatcatcattagtatccagttcaataaaccaataaagccactaaacctacctcgctagattggttgtatgtcatgactgcaatatcacggtcttcgctgaaaatggagaagctttctttccaggtctggttcacccctaggattgtgtcccccatatcatttttgacacaaatgagggaatccatgggaccccagcggggtttgaaagagtcatggaaagcggcatcggattcgctcatttgtgttgtatcgccagcgaaggtcttgggttgcttgttgtaaggccactagaggaagaaaaatggttttagctcaggttatcacatttgttaaactatctgaaaagtgacgcgcaatttcatagatacatgatgcagtgagaaaaggaaaaaaagaaagggaattataatcagtgtgaacataagaagggagttctaacctcaaagccctttggcgttgctttagccttcagcggagaaggggcggcttgcttgcgcggctgctggaacaaagagttcataagatcaatgctgtttgagaagcctttcttcggagatgctgtcgcaatgtttgtgggagattcatcgttcacgaggttacgatcaatgaaagcgcttgcctgcatttcacgcaaggcatcacggttctgcttgcgagggctgatggtacgctgcagctgctcggcccagtcgccactaagatcaagctgaggctttgcgggactgccgaagtgtcttgacatatggtaagtggtatccaggtcaccattggtgctctgatagtcgttccgctccacggtgcgatgaggagtaggaaaggcaccggccatatccatttcatctgcctcatctgatccaactaccgaatcgccagactgttggctctcggtgacgacgtcgtcgtcattctcagtagtcgaacccgtggagccttcctctaaaaaagactcggtttcaccgtcagaaaaataatcatcctccacaggcatggcctggttagcgaaagagccaggaacaagcttgcgctttttgaagtcgaaagtatcgtcttcaacaccaatcatggaaccgacgaaggactcatcgatagaaaaggtagactgatcgaaagacgcggggtcgaagtgagccctgctggtagcgtggtcagggccttgggcactcatggtgctttggtcgtgactctcaccttcctcttcatcgtagtcaaggccatatgtagtgaaatgaggcaccttgaaaacccaggttccagtctcagtttcgtagttaacgaactcggtatcgcccactttctgcagacgatcaatgtgtttgtcaaacagaggaccactagtgacaggcgagttgctcttcttatctctaccacggggccaagagttctcaatccgtagggtagatggcacgttcagtcccttgcccctggcaggcttgaccgattcctcggggtagacagtaatcttgcgaagaccaatatccacaatattggagaaaagattgtccagatcaacggtagtcagatcaacggggccgttgaaagtaacagaaccacagttctgacggccaacggtgaagtcaacgacttgtctgagctggtcgcggctcatcctgctaagctcggcacgggaaggttgcatccagtactcaccaggtcttgggtcaccaccggggatgaacgtaagacgcttaacagtagcaccgttggtggtttgcggtgcactttcggggacaacggcaaggtcacggcgggcagattcggcctcgggacgatcagaagtgccggcagcatcgaaaccattcaggctaccgctcttacgcacagagcgaaggaacccaagctcctcagcagagggctcggaactgttaggttcaacgtgaacaagttctccgccattgaccccggaggtatgagagtcgaagctgacctttttcttcagcttgtcggaagaatgggcatcttctccgttagtgagcaggggggccggggtgtgaagaggggccggggcaatgcgagaggtcgagaatatttcatttctcagaccacggttgatagtgagacgcttcagactgctgttaccacgtacgctgccagcctgcagggcaccgggagaaagaatgctgtccgcctctggatcgaaggtcttgcgaaggttgctagtggagtaactcttgctgaagctacgtccaatgctgccattgacgctgccgcggagactgctactgcccccagcaccacccaacaaactactaccaagaccagatgaggcaccagtgctgccagatggcgagccataggtagaataggagaaaccatatccacgctttggaggggtgatgagtcgattggcagcgttgggagtaattctgtagaccggcaacggagttcgctgcttttgcttcatgctggaagacagtggcgtggcaaggggaccgggagccgatccaccaggggcaggaagaccagagaagatggactgacttccatacgggtttccatcaagaagcgacgcttggaagctaccaggggcaggctgagactgttgtccgggcattgaggcaccgaaagcactgacacctaggccaccctgcggttgctggttttgaccaccgaagagcgaagagccggcgccttggcccgtgttggtttggccgccgccgaacatgccgccaccaccagttcccgtagtcgaggaaaagagaccaccaggcttctgctgctgttggttctgcgtgttgaacaagctactaccgccagcagctggctggggctgcgaggcaccaaagccagagaaaccacccgtggtgggagctggggtagatccgaagagaccaccgggcttttgttgattctgtgaaccgccaaatagcgtacttccggtaccagcttgctgattttggccaccgaagagtgagctacctccctgctgctggggttgctgctgggctccaccgaagagcgaagatccagcagctggagtgctgccagcaccgccgagcaaacctgttccggctccctgttgcggggtgcccccaaatccgccgaacaatgacttgggttgggtttgagcttggttctgttggtttgcaccaccgaaaccaccgaaggcacttggtgcttgctgctgagcaccaccaccaaagggtgaggctgtggcggtcggagctccgaacggattcgcggcagtggttgtttgggtattaccgaaaccaccgaaggcgccaccagttgtaccagtggcgccaaaggcgggcttgttctgctgttgctggttgttactaccgaacaaagacccgccggtgttgccgaaagccgatccagtaccggtgttgcctccgaagccaccagcggtctgtgtggctcccccaaagaggcttcctgatgaagctgcaggagtagttccaccgaataaggaagttgctggtttggctgctgaaccgaacaagggattagcaccagtggagccgaatccaccggcagtctgggttgcaccgaagccggttggcgcacttgtggcagcccctccgaacggagtggtgctagcgccaaaggcaggagtagctgttgtattttgttgaccaaatccaccggttgtggtgttaccgaaagcaggagcgccaaaaccaccggcttggccactgccgttgccgaaacgacgaccttgttggtaatccgctaggcgcagttcctcgaaagaccatttactgtagggttgcataaaacagatgctttggtagtggttcgtggtgttggctgagctggtatccttctcgttccagggactgaacggggtgctgccagtaccttcgcagttaggtagacctccttggaaagcagtacctgagccgccgaaacctgtgctgggggttgtggtgggggcagcggtagatccgaagccaccgctagtgccgaatgcgctggtaccggtagcagtgccaaagcccgtaggtttggcaccaccgaaaaggcttccacccgcaggggttgcgctggcattggcgccaaagccgccagtggtaccggtagaaccgaatcctccaccagcaccgaagccgccggtggtaccagcagtctgagtgcctcctccgaagagagacccggtgttaggagtgttgggggtgccgaatccaccggggcgagtttggccgccgaaaagggcattaggttgttggggtgtagtattggttccgaatcctaatgaaaatcaagagttagcaaacacgatcgacgtttcaatgaagcgactaaacaagtgcagattgatgaagagtggtcctggggcgcatgtcggtggaaatgtgggcaagtcgcaggtgtggagattccaggggggagccacgagcggtcattccagggggaccgaggagcacattcacagatcccatgtgcgcgagcggtcgtttggatcgcaaggccacgtgatgcgacgggagacctcgccagggaaaatcgggagggcagcgcaaagctcacgattgagcacgtacctccgccagtgccgaagccagtagatgtgctaggggtgctaccgaaggcgcttgaagtgccagtagtagcacctccgaacggggaagctgtcgagccaaagcctagatgacggaggggatcgcggtcagagagacttggattcgaagaagctcttgcattccttatcttgttgtggtgtcgctaatgcatccaaatggtccgctggtgaatttcaattgcacggcgaagcttattatgttgaagttttttgtcttgcgcgtggcaccatcgcgggtcggaattaggagcatcgattgttgatagggaaagccgaggacacgagtagaatgggaaacatggggatatggccccaatgtacaaggggaattcgaaaagggggacagaaaagacctacctccaccagtgctggtgccagctccgaagccagtgccagtaccaaagccgctgctttggttgttcgaaccgaaccctccaaatccgaaagacatgatgtcggctggactttgtcgggtgttcacgaagtcataggttgattgcgcacaatttcgagagagtgcagatcaatagaatgagacttgcgagaaagggtgcgcggagatgaagagaagagaggagacgcgacagaaaagaagagttaagtttgctggagacctgtgttaggtaaggtccgggtcacagtgatccgtcacgtgacagctgcctaaatcggtttcttccaatgaatgcgagcaaggacaatagatgataacaatagagttgtttttgatctgtttattgacgggtgactcattgatgcatactgcagcttgaggtgagatatcttatttatcgacaagtattgttttttattcacaattgatgccaaggtgaaaccttatgtatacatatctacttgatctagtttacatcccactctaattctttccctttcttaattcttgctgtattcatgacttccaaatgatccgtcagttcctacaatatttaaccaaagtcttacttccaaggcttatatcgacatgattgattcctatcacctctaaacacgaagaagaacgtatagacaggcccatatgcgtctagtacctcgtaacctataatatgacacatactagctccgtatagatgactgccatccaatcaccttaaatctcgagtgatcggtacaaccacgtgcgcatatcaggtggtcaccgctgtagaccggactcccacgcgccgaaggcaactataaaaacacagcctcattgctatgatttcctaacctaattcgagataagatagttactactgataattctcaacaaaagctagagagttcataggttattcacatgaggttggttcgcattctgcatgagagaccgcaagccatcattaagagagttgagatctcgcggaggttatgtaggtccacgacgagacaacagcgacttatgtacggagtactccgtaggaactatgtgcataatgccatgccgactacatccaatgggggctagggcaatgcaggtaagaaataacccctcattgggtatgtacgaactcacctgggcataggaggataggtcccacgatagaaggtacccaccgataaacactatacctaattgggatgggccttccaaggttggcatcttggattatgtaatgtgccattttcggtctgaatccggcagaattccgactcaaaggcggaaggcatagttaagccaataggagtgcttccaaaagaaaaccaagcactaagcctaattgggaagccttggcgctcccgaggtcttcattaaagagtggggttgattttaagtctggctgcatccgggtttgcccagggtttggtccgaggtaagtcatgcaagacgtttacatgcaactaatggattgttttacaattggtacatagatattgaccccgataattaaacataaatccaaaacttcgaactcgaagtatatttgaagcccaaaaaaatactattcacatcgcttctgagcgagccaagggaatctcaagtacaagtagtcatcctgaaatcgggcaaaaaaaaaaaagaaaagaaaagaaaaccgcccgcatagtcgagtccgattccgacatgaatctggaccgaggtcgggggtgtatgatccactgaggatcatcgtgctacttccaaaatctcaccgggaattttgttctccgacgtcattatcatcaaattcatagaccttcactttacttctggcgggcggcgtggacggttgcgatgatcttctccacgacactggggtgggagagctataaagatgatttcgttagttattggtctagatatacgattgcaagtgttgaggattgtgcttaccgttgagatatcaccgaggctgtcctcctcaccgctgaggatcttgcgcaggatacggcgcatgatctttccactgcgggtcttggggaggtcatcaacgacgaagacggccttgggagcggcgaagggaccaatggacttgcggacttgcatggcaaggtccttgctgatgttttctgtcgcgctgccctccttgagagcaacgaaggcattgacagcctggccggtcagctcgtcggcaataccaacgacagcagcttcggcaacgccagctatttatagttagtataggctcagtcggaaggttctgtgattgcacttacggtgctcgagaagagcagcctcgatctcagcggtggacagacgatgtccagaaacgttaacgacatcgtcgacacgaccgcggatccagtagtagccgtcgtgatcacgaccagcaccatctccggtgaactacatatgagttagtatcaatcccataaagtgaggttgcaggcgtcttacgtagtaacccttgtacacattcaagtaggtatccatgtaacgcttgtgggcaccccacacggtgcgggccatactgggccacggctgcttgaaggccagaacaccctcgacatcgttgccaagaatctcctctccggagacggggtcgatgatagcaggctcgataccgaagaagggcagggaagcactgccgggcttggtgggggtgatacctccgagaggggtgatgacatttgagccggtctcggtttgccagtatgtgtcgcagatgtgagcttcctccttgccgacagactcgaagtaccacttccagacttctgcggcaatgggctctccgacggagccaagaatacgcagactgcgcatcttgtggtgaatgtgctcatctccagcgcgcttcagcagacgcagagcggtgggggcaacgtagaattgtgtgacgttgtgcttctcaatgacatcccagtagcgggagaagttagggtaggcgggggtactctcaaagacgacggtggaacagccaagcaatagaggggcgtacacgacataggtgtggccagtaatccaaccaacatcaccaccgcagaagtagcgatcatcagagtggatatcgaacacgtactttccagtcatggcagcaccgagcaggtagccggcagtggtgtgcataacacccttgggctttccggtggaaccggaggtgtacagcaggaagagagggtcttcggagctgaccatctcaggggcgatgtagttggggtacttctcgacctcctcgtgccaccaaagatcacggccagcggtccaggggacctcggcaccggtacgcttgaacaccagcacgctgtgcacatcggggcattgcttcatagcctcgtccacaattttcttagtgccgatgaccttgccaccgcgcttgccctcgtcggaggtaatgacgaccttagaggaggcgtccaggacacggtcccggagggagtcggaagagaaaccggcaaagaccacggagtgcacggcaccaatacgcgagcaagccaggaaagcgatcacggcctcgggaatcataggcaggtagatggcgacggtatcacccttcttgacaccacgctccttgagggtccaggcaacccgggacacttcgcgcaacaactctccgtaggtgatattgcggccctcgctgggctcatcggcctcgtaaataatagcgaccttatctgggttcttgagggcgtgacgatcgacacagttgaacgatgcgttcaagcggccctcgacgaaccaggcattgtcgccgttctcgaatgagccgtagtgtgtagtctcaaagtcgcggtcgaatgtgaggagctcgcgggccatgcgggcccagaaagtgtcggggctcttgatagattcttggtaaagcgtcttgtaatcttccatgtccttgaggtgagtgccggtggggtgcttatcgtggaacgccttggggacgtggaaagtgtcgacatcgtgtgcctcatgaacctagggcacgctgttagcctatgatccgcgggtctgatcatcttaggtaggtgactcttaccactgcgggcttgggaggcgaaactgggccgtccgacatgattgcgcggtccaatgggaatgattaatgcaggattccgtatataataaattctgcgcgagaccaaatgttagaggaaatgaattgcgaaaagtccagaataagaatggagcaaaagtgggaggagctctttattaatgcaaatggtggggttggccaaacttacttgaaaatggaggttataagttataaagcggtatggacaaacggggagagtcgcgggggggtatgtatagcaattagagaagagaaagaaaagaagaccaggaggggattcacgacattattagtagttccagcttgcccggggcgatgtgccactttccctttccttcccttccatatcgggggtggcccgtgcatggcagtatcataaattacgccaataccactctatacatcgtgtcttagccgcagacggcctctaatctacatgtacattgtagaactggactgctccacttccgatctccgaaatcaggatggaatccgatacatttcgagtacaattcactccagtcataaccccgtgtcattgcccatatgagtttgggttcggccatgcgggggtttgaacgtcccttccgttgctccggggtagcttgcccctccacgatatttgactaagatgctgctcgccacctcattggggcgtttcgagtcgggaagaaacgctagttggaccgaccacggcctagttgttctcgtgttcaaccctttgtccgagtccaataggcgggggccataatcttggcttagccatgggccaaggtccggggaatgtcgcgggccaggggagagcgggccacaggaggcctgcaagtcagtcacgtcagtgagattcagagatacaagtgtacgacttatcctcgagccccgcgagctgtgtcccgccaagccttccatgttgcgttcgaatataaaagacctacctcatgcatcccttgtatcgattatgctactcagacctcgggaactcagttggacttggatatgtcataggatgatgttatgatgtcacgggattttcggaccgagtctcccccataaaacttagttcgccatcgaggctcatcatgggaccggatcgccgacttcgggagccctagagaatgtggggtggatgagtcagcgctccaaacccgcaattggcgctgtttgatcggatgaccatcgtcgtctgaaactttgacattgcacgtatgtggtaatccggaggaatcaggggggattgatattaaaagattaacatgggcccactgttcggttacgagctctatttgatttactccgttcccatgtcgttactagttatcataattatcttattgttatatacggttttatgtattgtggggtaaatgagggtgagacaaaaagggggggtaccttgcagcactggggatttcgtctatcttactagccttactactcgtactatgtactacaacatttgtactttgtcctttttccagttctcaatgttgaactgggggaaatactttaataaagatccttctcctattctaggggcccatcctatctcttaccacgagtcaggtaataactagcctgttctacgatgtgcatcgtacatttgacggcgggatcttcgcccctctgtaactactgcatgaagatctgtggaatacacgaaataaccacgctgtgtagcttctctgctaaaaccaaaagggcagtctaagatccaccttttcccactcatttcccaacaaaaagaacaaacgtgataccgcacgctacaccgggtgatccgacggggtatgaagccgtattggacggtaattaccagaatacgatcctggaaacccagcggggagaaacccaaaacgggccaatcagcgcaacacaattttccatcaccaatatttttgtgggacgagttccctcagagtgcaagagtcccgagaaaagaccgcgttaactccatgccttgccccaacgaaagacctcgggaaacatagcgaggtccaattccaattccacaaggagtctgttgagaaaatggtccgcaccgaggcggttgtacaagcaaaacgggcaaaatcctatgcggcccttatctcttaaatatacggactacctacaagtagactaacggtgcgccacgcgtggcttacatccttttcggacgggcccgaacgactatacgagcattattaatctcaaaggtcgcgagcaaaatccgaggaatagaacgcggctagatcgccacggctctcaatactgccttgctagtcatgtcgattgcagggaggggccgccctctttagcctcggcatttgttcggtatagtcgtcagccatgttcctggaggtgaataattatcgtcggtttcgaatacgcagttaagagtggacgagcggatcattgggcggagcagggtgcggaagatgaagccagtcctggcttgtagcccactatggcttacaacatagcggcgatcagcttattttgagaggtacaacctaggcaggagatgagaccacctccctgttagattcctggggaagccatctccaggaaatccaggatgtctgacgagaattcccgagtctatctataccgccttcttatacaggtacaccgcccttcttattcaagtttaactggtggacaataacatttccggcaaaactattatcggggtgttaacctggagcggaccggggtaagggatatatatagccgacaaaaacacgggggactttcgtcatggcgtattcgaacattcttgcttttattgttcagatacaaaggtgccacttgttaacctcagcacgttgacttgaggatgttctagggtctatagtggttaactacacacacacaccacactggtattgagtcagtcctttatgataggaacaacgtttaacatttgcttaaaaaaagcttcaactctatacttcgtctgcatcttccatttttgatatgcttatttccaaccccctgtagagttgatagtcatgataagagatatttgggttcgatgttgcgggaaggcgtcccccttggaacctgcttatgattctcagcttccaccgtctgattgaaattacaacattttttttcagtagacggcctgtttgaccagtgtcactctatccataaaatgtacggcacaaaaggcgcaacacgcgcccttcattccaatacccggcggttcaccactaccactcgactacaagcaccatcaggcctcaagatcaatccggagcgcctatggaacacactacacgagacatgtaaatggggtgctgagcatcgctatggcgagtatgtatctatttcccattcggtcattgaacacaatctaacgacataaaagaaacccaacagatacggggatggctcgtctcactctcaacgatgacgatgcccgtgttcgtcggtggtttgccgccgaagtccagaagttgggctgctctctttctgtagaccagatgggaaacatgtttgggcggcaatcgggtcggttgaactcggctgcgccaatgaccgcaatgggaagtcatctcgacactcagccgcgaggtggtcggtatgatggtattctcggtattatggctgcgcttgaaattcttcggacaataaaggaaagtgggttccagactaactatgatatcggggtggtcaattggaccaagtaagcatcaagatttgttttatcatgccatttaagattgtcactaacaagttcatagtgaggaaggtgcacggtttcccaaatcaatgtgttcctctggtgtctgggctggtgcgattccaatccagaaagcctgggacctgcgtgatattcacgatcctcgtgtgactctccgctccgagctcgaaaggcacggatatctgggcgagattgcttgttccagcgatccagtaaccggatacccactcggagcccacttcgagcttcacattgaacagggcccaatcctcccaggaaacaaccgatcaatcggtgttgtccggggcgcccagggatacagatggttgactatgaccgtccacgggaaagacgctcacaccggaacgacacctttcagtgaccgccaagatccattactcgcatcatctaggatgattgcggcttcgcacgacattgccatgcgacacaacgcgctagcttcgactggtatcattcgagttccatcgaacgcgtctaccaacaccgtctcatcgcaagtgactttcacgcttgatatccgacatccgcaggatagcgtggtacacgccgtgcaagacgagtgcctccaggcgtttgaggctattgcattgcaagatggcaagggtgtgtcctttgactggacgttggatacggactcgccggctgtcgagtttgacgataattgcgtagcgtctgttcaggctgcggcggatcagctggttggtcgtgagaaatcaatgcttatgaccagtggcgccggtcatgatacggtttatactagcaagcgctgtccctctgcgatgatctttgttccatgtcgggatggtgtgagccaccacccgacggaatattgcagtccgcaggattggtaagtctttcttgtttctctggtgctttttcgaaatctgactgttgcagtgctttgggtacgcaggctcttcttgaagctgttgttcactatgatcaattcaggatagaggctgaagggcaaaagtaatcggtagttcaaatgtatcggcattaaactagacctagatttaactacggagtattctatgataatttcatctttagacaaaaagaatatatatcgagataagaaacgccaaatatcgttcttaacgacagaggccacaaatgccaccgactattcttttacattaaattcccaaaatatatatcacatacatgttgcggtcaactcgtcctgcacagagcagacgtcaatatcgtgagaaggtggagtccccacttaacctgccatgtccgcagaaggcgcaatgtctttagaaggctcacgataagaaatggttaggtgatatataaagtatttgcattaagcccacatcaaataagcatatttacgcccaccaacatgtcatcacgaaggtcgatctacttcaaccccgcggcagcaaatgagagcagtgccgccccgcaaatcgaaggcctaacagcattccaccaatccttcccgaactatgccccaaccccactagtccaactcccagagctcgcagccgagctaggcatcagcaacgtcctcgtgaaagacgagagcaaccggttcggactaccctcattcaaagttttaggcgcgtcatggggctgtttccgagcaatcgcagcgcaactgagcctgccctctacggtctcgctcgatgaactctccagccgagcaaaagaagcctcgattgtcttgacgacagcatcaatggggaatcatggacgggcagttgcgttcatggctcgcctcctcggtatcgaggcgcgggtcttcgtcccccggtctttgaaccagtggactcgggatctgatcgccggggagggggctcgggtagttgttgttcagggcgattatgaccaggcggtgcaagaggctgtggatgagacgcggatgggacagggtgtacttctcattcaggacacggcatttgaggggtatgaggatgttcctgcgtggatcgtggaggggtattcgactatgatgcatgaagtccagagtgaacttgctcggcttgggctgtcgggtagtgtggtgatcacgcctgttggtgtgggtagccttgcacaagcggtcgcgaagcattgcaagtcgcagaacacgactatatcggtagtcgccgttgagcctgatacggctgcatgtttatcttctagcttgactgctggaaagccggttactgtccggacttcatcgacgattatggatggtatggactgcggcacggtatcttctacagcttggcccgatctacagagtctgattgatgcctgcgtcactgtctcatcctatgagagccaccgcgccgtgcagtatctgacttccaagtctgtggctgctgggccatgtggaggtgcatcgttggctgcacttcgacgattggccacatcaaaggagggaacgtcacttttgaacaaggattctgtggtcgtccttctcagcactgaaggtgcacgcgagtacccagttccaagagacgtttctgttgacgatgtcgtggagctaactcaaactctcactcaaatcaactcttccaacctgaccttgtctgtaacagacggagtaggtgagactgaaatcgcaaactatctggccgcctggttcgcccatcgagacattgagtatcattggattgagaaggtcgctgaacggccatctattgtgggagtcttgagaggcagcggcggtggcaagtctctcatgttcaatggccacacagacaccgtcagtctctccagctacgaggcagatcccctgtccgggtcaattggaaccaagaatggcaaagaggtcatcttcggccggggttgcctcgacatgaagggagggttggctgcagggttagcggctcttgcagcaatcaaagcaagcggtcgcgtacctcggggcgatatcattctagctgcagtatcagacgaagaggatgcctcacagggaactcaggatgtgctcgaggctggctggcgtgctgatgccgctgtacttccagaaccaacgcaaggcgcgatatttactgcccataagggattcgtgtgggttgaagttgatatcctcggagttgctgcccatggatctgaccctgtatcaggagaagatgccatcctatatgccgggtccttcttgcagggtttggaggaataccaagcgcagctgccagtagatgatctcctaggacagagttcgctacactggcctaattcggggtggcgaagagccatcgtcctacccagacaagtgcactatcactgtcgaattccgaactgtcccagcacaaacggaacagtccatcctaagagacatcagcgcgctgctgaaggaaattgcccagcagaagcctcgtttcagatacggcgagccacgtattaccatgtcgcgccctacacagaaagtggcagctgatcatccgttcgtgcaaaaagcgatttcttgtgcctctgatgttctgggcagcaagcctgctgttaaggctggtccgttttggactgatgcggccttgcttggtgctgttggtatcccatccattgtgtggggcccggcaggagagggtcttcatgctaaggaggaatgggtcgaagttgggaatcttcgacagtttgagaaggtgtttactcggcttgtgcaggacttttgttattgaatatagacgtctgtatgtaagtactgtttagaagaacacacatagattatttttcaaagtttcccttgtacctatctcacaacattccaactggaaatactacttactactgcctcgtgcatttgatagtcttgtagtcggatagatcgtggtcgtagtccttgcgatcattgctacagtcggtctgaccgtctttcgtcagccgttcacctcctttcggtacttctcgtaggtacttcacgtcgttctgtttagtcgctctagcttcgtagggatgttaggtcgcttgctttcgtcgaggtttggatgaatataatcctagttgccgaggttttcggtaattgctaccacctattcaaactaatacagcccaaagaaagtattgataaatgggattattcaatagagacagtcaaacgtggtactagttgattcttgtagagcaagtgttgtgttgtggctggtgttcttatcgccacgggactacacagccagagccgatccagatcggccaccttcgcctgacgacatcccactcaaaatcgactagtacacccatctcgttgtttccattccaagcaaattgatatatattttcttggagatcccgcaacgatggcagacgaatcaccagcacagcgatccgcacgagtgcgccgagagcgccgggaggcaaagatcaaggaaggaggatcagcacgcctggacaaaatcaccagtctgagtggacgcacgccacaagctggtaagaaatgaaatttccatccccggctctagccaaagagctcctgatagcaaagcagacatacaatcccttcagcctcgccagtacaaacaatgctaactgaaatcaactacaacagaccgcgacgaagcctcctccccccagtccaagcacgcaatccctgaatctccctccccaggacctcaaaccccccagctcggactctcaccctcgccccaaccagacctgcagtcccaagaagcgatgcgcgcccagcagcaagcgttcttctcaatgctccgacaatccgcaccggaacccaaccagggcatgcatcccgacccacaagcgccaaacagcctccaggcccaacaagaagccttccgcacgatgctgagacaaaccacacaagaccaaggaccggaccaactacccgacggcgaagaccccaccatcaagctcctgaactccctcatcggcgctatacccggcggtgacccgaataccccaggagcacccccaacaggcgcaggcgcaggaaacccacttacacccggattctcgcccgccggcatcgcaaccatgctcggtgtgccgcctttccttgccaatatgttgaatggagcgccgccgcctacggaggcggagcagaagcgcgctcggatctggaagacgctgcataccgtttttgctgtgacggttgctgtgtacctgcttttcattattgggtcttcggttgcgttgttcggtagtccgccgccgaagcctgcgaccgtgcagaatccctttgctatctttgtgacgggggagttgatgttgactgggggcaaggtgttgcttggtgggaagtctggtggtatcgggatggcggtgcaactttgcaaggatgtcgtgagggatggtagcctcctgctgtttatcctgggcatggggacttggtacaatcgcgaatggcagactacggtgtactagatggcttgagtatgtgcggagtagcttcgttaatgatcagcggtatgagcatttcaatgggatatattttgtgatcattatttcattatcgtatgttgtatatcacttttgatcgacgctaagcagacatgttgaaggcccgctgagacggcgggaccgcattacgtagaacacgcaatgccgatgcatctaaaccccaatcaccttcccattgatccatacgggctcctttcttgaaatgacccgccagatgctccgcccgatctgaccaggtggacagcgaagatccacagaatccgcagcggctttcgacgttggcggtcgatccacgccaggcttcgaggtcagccacgggggctttcgtgcaaccgtggaatttgcgcagatgctgccatagataatcctttcgactgaatgaccgctcctgagtaggcttatcggcacagacttggaattcatgctcttcccaatgggcgaacgttgggaaaaggacgtcgcaaaagggacattctgaaaactggcgttcgaacgcttgttggacgtcgtggggatttggagtgcagacccaggagtcaagggtgaaatggacacttttctcgtggcgggcccagtcgtgtttcttcttgaaggactgtgggcagaatgtacactggaagggatggtctaccgccgttcgttgccgtcctcgggtgcgtctgagtttagtttgtttggggagtagtggaaatggcagccccgtgtccgctgaggaatggtagctccatgctgaagaggcgctatcggatgtttcagataccttgctcccgatgctggatactgatgacgctaagtgggacgagctctcatcaaaattgaagaaatccatggtagatatgtcgagctgcaacgggtcgatgctgtcggccgagtctatcgagccagaggaaatggcattttgaatagtcgcttctggaataggttcatcttctggcggcgaagcccgccatcgctccattggggtcagggaggacagcgtgctggtgaccatgggagaccccgagcgagtacgggatgtggaagcaagacccgcagcctggatcttttgcttttgacggcggcgggcgtttgcaaaccaggttgatatgcgtttctgggagaaccccgtctcgtgggccatctgatttttttgttcgtccgttggataaggatattcttgattttgatagaaccactcgcggagaactctagctccttttctgagaaactgtttgggttctttttgttgatggccattgtccatagtagcagcgggaaatggatttccatcttccgggacaccgtggagatgaccaaagaccggagagaaagtttcaaatcccgacggttggcgtttctctccctttgctaagctgcattctcgaaaaagggctacacaacttgagcaggagttcttgggattgggattggcaggtgcagtgcgaattatcagacactgtagccgatgcctgcgacaatgggcacatgatacaggaggacgatatgctccatccagccactgcgagacatttgtaagacttcgttgcgaggatgggccaacagattctcttgctaaagagggagcggaatcatagacaatttcagaagccttcaattcctcatgatcttgatgtccaggttgtgcattgacggtttgtgtgaggtgtgactcataattcgtccactgcgaccattccagatcactggtatctgagggaaacgggaattggtagtcagtatttgtatcaaaagaactctctttgccccattgggtgggctcaatttcacccagcaagccctccagctctatgtctgatagaggctgcgacaacggctgccatggtgaagggttgatcgatggcgaccgtgaagtcatgccatatatcgatgaacagattcgccggcgcagtgccccttcttatatatctctaatcccaagcccacaagtagtttggctagaacccgtcgcgtttatgcttcgcagtgatctgccaatatgatggggtcgtcaacaagtccacgctaatccagattaggccaggaacgtttctctccgcactagtcctaaaacggcaggtgcgcacttgcctagatgagttgtgcatattactaagctttccgcccccgaggcccgtggacgaatctcgggaacaaccattggatccgccctgcatctcggggtctgtgacctcgtgtttcctgcgcctactcagacttctctagagttgccttgccgactacttcctatctatctccataaatccttcgaggtttcagattacgcacgaggttgtgattgtccaaagttcctggagtcccatccttctaccatcatcgtacttggttgtacctaaccgagcacaattgagcaaatcccgaagagatggcatgtttggatggaacaatcccaatctcatggtctagcctccaaagatgtgtttgttcctaggcggctccaataaaattctatggaaatcgactcggaacgttgcttatcagaattaagcttatctttatgttattgcaagaccaaacacttaaagcttggttcacatagaatccgtattaggcaggacgctaagtgaactctatgctgtgggggataaataaacgaattggaacgggcggagaggttgatatggcattgatgacagtacaacggagccagagataggatattagacccggggtagatatggaggaatatgtacataacgcgactccacagtgggccgcaccggagttggccttatcgtccgtagttcggacgggggcgttttttagtcgccactcggtgagagcgccaatttatttagcgaaaactcggcatgcacccgattcccggtgaagatctagtctcgggaaaaaaaaggctatctgatataaaattaaagccacaattcgcagcctcttcagacgtacatcgatcggtgtatacaaccttctccagcgttccccagcaaataataaaccttaataacatgactggccgagcgctaacagtttctatgtgtcaacgatcaggcaatttacgctacaatgtagtatcaagtgggactgggggtggaactggggcaaaactagctttcatgagcaatgagctgaatttccataaccaaatagaatgagtcagcaaggcacttccggcaccgacattggccacacgctggtcagatctccggattcggtccgacctgagacaggtcattggtgaattcgtcgcgttgcatcgaattttctgtggaaccttccatttagtcctacggggccgaatttctctcgcgagaaaatggggaaacaataagatggccagaattcccgcctgggtttgtttctttcctcgtgggctttaaacatttcttctccatcttcaagacttgaactacacacaatggaggtcaacacagcaccacccgtctatgagaatgacaagatcgcagaacggaaagatgaattaacatacgaggaggagggccccatcaagactggcgaagtccacgatgcctttggcaacgaggagtacgctgacatcaagtataagaccttgaagtggtggtatgtactatcgttgggaaaagagcctctcgattgaccgtgctaacacgtcttcaggcaatgtggcttgctcatgatctgtgagtcagtctcactgggtgtgttgtcgctgccagcagccatggctaccctgggtctcgtccccggtatcattctgattatcggcctcggacttctcgcaacatacactggctacaatattggcctcttccgtgaacggtatcctcatatccagaacctgggtgatgcgggtgagattttgctaggccgcttcggccgagagctctttggtactggccagttcctcttctgtatcttcgtcatgggcagtcacatccttaccttccgtgtcatgctgaacaccctcaccaaccacggcacctgctccgttgtgttcagtgtcgtcggcatggttatctcaattctcctgtccatgccccgtacgatgaagggtatgacctggatatcgttcctatcattcctcagcatcttgagcgccgtgatgatcactatgatttccgtgggtgtcgagaagcaccccggtcgtgtcatccacgccacagtccccaacgacctgtacactgctttccaggccgtttccaacatcgtcttcgcttactgcgcccacgttgctttcttcggtttgatcgccgaaatggagacgccccaggatttcaagaagtccttgttcatgcttcagggctttgagatctgtctctacctgaccgctgctattgtgatctatttctacattggcacagacgtgcattcccctgccctcacttccgcaggacccctgatgagcaagattgcctacggcattgctatccccaccattgtcggcgccggtgtcgtcaacggccacatcggcttgaagtacatctacttccgcctctgctccaagtccggtctgatgcaccagaacaacaagcgtgccgtcggtctctggatcggtcttggtattgcttgctgggtcgttgcgtggatcatctccgaagccattcctgtcttcagcgacctgaacagtttgatcagtgctctgttcgcttcatggttcagttacggtctgtccggtatttactggcttcacctcaactatggtcaatggttctcctctccccgcaagatcgcccttaccgtcctcaacatcttcattgcctgcattggtttggtgctgtgcgttcttggcctgtatgcttctggtacggctatcaacaagaactccaacagcaacagcttcacctgtgccgacacggatacttagatgaccttcttgcttcttgtttcatagcgctagaccttgttaacgttacacgccctgtatatatactgcatatagattatgctcggagcgcactggctgactctagaatataaataattgattaaaaattctcaactatcttgcttgtcctgattgtagttagattgtagttagattgaatcataagagcaagagaggtgatccttaccataccagaattcggtatatagacctgctacctatagatatggaagtcttccaatggtaactagctctaagcgattgaccttgaatacaggtttcgttatatactcatattttatagcaatgttcacttaatacatggtctgtgaagcctattctattccaattcagcatcgggcgtggctgagtttgcttggatgtaactagaaaagagatgaaagaggttagaagaatagcaaacatggcgtgttagaaagagtctctagatactttgaagtttatgttgaagaagtgactaggagttgacaatgagatgaaagctcttctattgagcaatgtttgctaaagccggtcattctcactctttctaagtctacacctacaactgccaccgtgaccttcaatccccctctacttcttctctccctcacacttatccttcctctcttctttcacatttacctcaagtcaacaatcattccttttagagtgagaggtgacattcatcactcaaaattcaacaggacagtccaccaacaggaggtaatatttatcatcaaagcgtctctcaaaacgaagacgatgatttacctcaactaggtgtaccgagatggattccaaaacacctcagatctcgccggcattagaaaccctaccatttgaaattcgacgtcatattctttctatggttgaaatcgacagtctcaagaccctcgtgcgagcctctcctgtttactttcaccactaccaactagaacgcaagctcttgctgtgttaaagcctggagtcgacattgggtagcgtgactgctgatgcctatgcagtccacaagtctacttccatggaatgttcaaaaggacgggatagcaaaggaattgatgattttctgacatcctaccacacaatgaggtctcaagcctggctttcacctttccacaacattctcatcatggaagaggtcgagacaatggtcaaatttcattgctcgattgttcaacccttgatgcgatgctttgtgagagaagcattgactaatctcaccgagaagacaaacgagtctcagatctcagatcgaagagactccgagtacaacagaagagacaaaactgatgcgcgggttttaccgattccaactctgttgcaacatctatggcctcgaatcggcggaatctatcccctatgttagctggatttctatctcccagcgcattctgggagacttcttgtgcatctttgacccttgggaggcagaagagatatcttgcgtcagttatttctgcgaagaaaagtgcgagcagatcttcgatcagaccaaacagggcctggatgaagagaactccggaatcgatcaacctgacatatccgatattgctagcccatgtgagtaggaacccactagttttgaagctcgcaatttgagctctatgtgcgggtctgaaaataacaattttggctttgaagcaacagccaagttgaccaggaatcgtggcctcgagctgctgcacttggtataccccatcaaagaccaggaccacttggtagttacgaggcagttgcccccacccatgcgcccgagcggcgttctcagtgatctccacagcgtcttcgaacaacacttacaatggcatcgacactgcgttcaccctggggaacgcgaccatcgacaggagcgccgtgagccgctcattttccaatgtgacaggaaacccgatggaagttgcgcgctcccaccgctggcctggacgataatatggggtggaagttacagtaatctctttggggagtacatccccgacgcttcatgtgaatgggcatgggttatgtgggacgcagatcgacttaagcgaatgagtgctttgggggtgattatacaggaatgggagaaggagcatcatgatgaccctaggaaggattacttgtgaccggcactctatgaggcgatgtcgatatcggcacacacgacgatctgcctactctttcttattctcagcctcactcctatcgtctctcctatcatcatcatcaagattccaaaatcaagatgtcgcgaatcagtggaattgcatcttccctttatgtccctttatgcctcaaaatcatcaatgatgggcagacctattacgactttgacgccatccagccccgagggcgagtcggtcatgtatggtgtttggaactctatccttacctggcaattctacttgcccgcatcacagcctccaattcagctctcgtggcttttcggatttcgaagtgcactaatatatttctctggttgtgcaatgcaagtgggaattcggtagttatatatgggacagtccgagagaccaactggaaaaataccttcaaccgattcatggcgattctgagtccagtcctaccatccacggaattgtggccattggagaatgagtcagatctacgagtacgacagtatcttgtgcaaatggcttcatccagctacataactagctctctctgtttgtttgtataatcattcgggcccgaaatccttctttctctcccggttttctgagcctagcatcaatattaatggagccgacgtggccaccatactaagggtagttgaagattagagtctggaaagatccaatcacaatgtgtcattctcaagctacataatcccagaaagcgaaaccccctcggctagttcatctgtcccatcagtatgtaatggtaacattcttgttcaaatacttcgcgtctatcttcaagacaaggttctcagcaagccacccccccgcatcctcccgggagatagtatagccaatagccctacactcaggaccagtcttgggatcctcgatgcccacacggatagtcttgtccgactcgccatcaacaaggtggctcgcacgaatgattgtgaacgattccccgctctgcgcgaaacggtcttccatgactaccttgtctgctccggggacgctgacaaacaggtaatagatgggtatcataacaaaaggaacgtcgcggccgaagcgcgagaatcccgctgtactgcacccaattatgtgtggagttcccgtaatgccggcgcttcgaagctgggcgagggcatttaggatagttgccgcgcctttcttgcatacgtctggatcgtcgacggtcattctgcgtggcttcgcacctatggtagacacaatgacatcgacgatgtggccatcgtcggtttggaggcactgcgatacggcggagatatcgtgtgcattgcccttgatgactttcagatttggtgttgactctgaagggaagatggttgtgagtttcgagggatcacggcacagcgcaatgcatttgtggtccgcagcgagggtgcgtttgagggcagcaaggccaacgccggtgctggcgccaaagaatgcaacggacttggtttttgaggtcatcttatgggctgtggttgtgaaagtagcgagatattggaaggctatcctctgatgttgatagtggaggcgagctggatgttgttcctagtgtcttggaaggggcgatgggcttcataatatacattttggctgacagcagaaagcgaaaaatatccgagccaacgcacaatgcctcgctattttctcgcgacttgcgactcgcaactcgtattacaatgagggggagaacacgaggctaaccaaatgaggcggaaatgccgttctctcgttggttgtcgctcaacctacactactgagtcagacagccaactcttccaggccttaccatttgcctaacgagatcaggataatgaaggttttgcttgatccctgtctgattgatcactcactggaacaagcccatcacggtcccaggatgcccgaggagcctcctgtcacgggggacgcgctcgcttcggcctcggatgccgagaaaaacgcgagtttcgacgcctcaggcagaaacacaacatcgccgaagccgcgcagctgcgttgtatgccgaagtcggaaagtccgctgcgacaagcgagcgccttgttccaattgccgtcgcgcaaatatcgcttgtgtacttccaccaacagaccgtccgccaagatgggctcgccacctcgaccgcctcaacagcgcggtatccaacctaccggccttccaaaaacccgaagaagacgtgatggagaaacttcacaaccttgaaagccttgttcaggagctacggattcagctggaacaggctaaatcagcagctaactctgccgaagggtcatccggggttggttcgcctgaaagctccgcgcatgatcgacagtcgaacccatcttccattaatactgccagcgtgcaaaataaattcgggagactggtgcttcgggattcaaaccgaagccgctatgttagcagtggcttctggtctcgggtcaatgacgaggtatgccgccttggtttgttatggagtgaatggcgagttaactcctactcagcttgatggcctcagggctgatgttcgtgatcttccattaggggaacccgatacctcggacgatgaggcatcgcaggagatggtcccttctacacaagaacttgaacggacccctggagagcgtcacggattcttgtttgggcataatttgagtcctttttcttctaacctaagtgaccttcatccactcccttctcaaattccgttccttctagacgtgttctccgaaaatgtgaacattatctttcaaatagttcatcttcccaccgtcaagagcatggttcgcgattggcgcggccgtgaaatgaaggatctcacatcggccaatgaagcattgatgttcgctatttactacgctgctattacatcgatggaagaagaagatgtaagtcaaattagattttgaactttcggacggatccaagcatgcgggctcacgtctcgggacatttaggtattacttaatttcggagccaccaaagccgagctcaatctcaaatatcgccaaggcctcgaacatgctcttgccagagctgattttctgaatgcacctaagctagtcctagtgcaggcatttgtaatctttctgtatcttgctcgccgacatgacagtccgaggtttgtgtggatgatgacaggactagcgatccgaatgggccaagctctgggactacatcgtgatggaacacatttcgattatcttagcccatttgagattgagatgcggcgaagagtctggtggaacctttgcattttggatgtgagagcatccgacgatcaaggaacagattacacaatcacaggagcgagcttcgatactataatacctctgaatctcaatgacatcgacctcgaccccgaatcaaagcagacacttcaagctcacgatgccttgactgatatgtcagttgcacgtgtctccttcggcatgtgcgaggtcacgcggcagatgatgggtcatggtttcaaagaagcagcaccaagtctagaagagcaaagtcgcttattgcaaaaaatagaccaaggtcttcaacgggactttctccaatactcaaccgaatcagggaacattacatactgggtgatagttacggtcgctcggcttcttatggccaaaatgactctgcttatctacctgcctctgttgttctcctcctcgaatgaagacttctcggaggagctgagaacaaaactgctggtttccagtatcgaggtcgccgagtacaatcatgccctgaacaatgaacaagcatgtagacactggcgctgggctttccaaacctatacccattggtactctattgtctacatgatgcttgaaatctctcggcgcccgtggtcgcctctttctgaacgggcctgggtagcccttcacagtgtctggctaataccgaaccagacacacatggaaagggatttccgcatctggatcccactccgaaagctgatgaccaaggctaggaagcatcgcgatatggaattcgggcgactgagaagcgactctcaagctgtccaacagctgaagcagagctattttattgctccactcccgtcgagcactgggccgtttccatctgattcaaattctgcagatctgttccttgaccaatggctccagctagtggcacaacgggatagaaccaaagatgaagcactcacatcagggctcgctatcactaatacgtcgaatccaccgatgcaaaatacaagcacaacgcagtcaagggtgcgttctgctcccaatttatctcaaacattctcctcggctttcaccgttgagccagagtatctcgttgcagaagaacggcatttcgggtacgaagtatcaagcagtgaatctacaaacttcgactcagtcatggcgtctaatgcaggactcggattcggacccgaaagctctgctacttcatcacataatcacttctcaatggcaacggaagctcaatttgacggtcaacttgccaccccagctgttgtaccttggctgtggtctgagaaggacatgtcagctgatttaaatagcatctccgaagatcaagccgggagtaacatgggcatggatgaggaggtggattggtacaattgggccgcgtctgcgaaggatatggagtgtgatatggtgaattatagtagtggaccacgctagcctccagttatacgcggggctgctggtatccacctcggttgtaccttgattctggcattttccttccttaaataggttattggttctggtaacagattctcgatctgataattcgttctaacgccttccgagaatgtggatcttgatggtggatatttgacggagaaactgaccaatcaaacgagcccagcgaccatcggagcatatatgcgcgtggacgtaatacgaatcaagtatctaaggagtatcaaaagtaaagaaagaacatcaaaagctagagggtttactgtgctcaaaatggtgaggctgaagaaattgatgccaggtaccttttgtatggcccacaccccgcaaacctgagaaaatggattggattcatccaattcccctgaaccccgccaagacccggggcttgggtaacgtggctgagtgtcccgagatcggacctcgaggcctgataggtggccaggtgagaagctcgcttcgagaaaattctagtgccagtcttgcaataaccttggaaagctaaaagcgccacagttggattttactttcatgcacaattactttaaatcttcgagctcctcatgagaactggtcattttagaggaaaattgtagaatctggggttgaacatggggtaaacctaatacataaagccttgactaacagtttccaatagcgttatcactaaggagacaatgctcggggccgccgacttaccatccggggtggttctatattgcacgccgggccgggtgcgccgggccggtacaatctgacgccgggggcgcataccgcctacggaattggctcgcggacgccaaataccccacaaacctggcatcggtcaagatattaggtaatcattccccggtgtcgcgagccaaacccatgaacgcattcttcaatgccatcctcgaagttgcgatctcattggcgatttaccccggagaacaccccggagtaaatttgagcgagttcgggatttggtaatgactcgtctccccacactcactagtatatcaattagtagtactccatactatctggtaatggaatattctgttaacctttagtctctcacgccaagcaaagactctgggccaaccgttctttttgggcctccactagcgattttcggtgttttttctttcgcccaaaagtttttctctcttcacttctccatatcatataccttccaacatgagtgtccccgaagcaccccatcctattcaggactacgaagtgtacaatgactcaaccgacatggagaagaaggcgtacccggtcgaccccccggatgatccctttgggaacgaagaatctggggaagtaaagtatcgtattatgccatggtggtcagtatctcactctgtttactatttttattgcatcaaagagcacatttctgacttttatatacaggcaagctggaacgtgtgagagcccatcattaaccctagtcaacaggaaccccattctaacactgttcatgtagtgatggttgctgaaaacatttcgctgggtattctatctcttccatccgcagtagcaaccctcggaatcatcccgtaagaaaatttctacctccacgatgcagaaagaaggctgacatctcccagagcatttgtcattattatgtttttgtccgccatctcgtggtacactggatacaccatgggccagttcaagcagcgttatccccaggtccacagcatgggcgatgcgggcgagcttcttctaggccctatcggacgcgagattttctttgtcggccagctgctgttcatcatcttcttgatggccagccacattctcacattctcggtgttgttcaacaccatcacgaaccacggtacctgcactattgtatttggagttgtcggcttggtcgtcagctgtgttgcggccctcccgcggacagcagagaaggtcttttggatgtccatcatctctgccatcagtatcctggtagccactatcgtcacgatgatttccatcggtgtgcaggcgccctctgatgtccagaacgatatcgtcgcgaccccgaccttccaggaaggcttcttggcggttaccaacatcgtctttgccttcattgctcacgtgtctttcttcggtatcatgtcggagatgcaggatccccgcgatttccccaaggccctcgctatgctccaggttatcgatactactatgtatgttgtgacggctatggtaatctactgctatgcgggcccgactgtcgagtctccggctctatcgtcggctggacctataatgaagaaagttgcctatggcctggcaatcccaacggtgtgttatatctccttgcagtcgattcgggagtctgttctaatctctgataggtcattgttgccggtgttgttttcggccatgttgcatgcaagtacatctatgttcgaatcttccgcggcgatcgctcccaccacatgcaccagaagactttcttggctacaggtacatgggtcgcgatcggcctgactacctggactgttgcgtgggtcattgcagagtccattccagtgttcaacgagttgttgagtttgattgtatgttctatactcatttattaccgtgcgtctactaagttgttatacagagtgccctattcggaagctggtttagctgtaagtcgacttctgagactaagattgatgcgaaatagattactgactgagaacagacggcctccctgccattttctggttcatgatgaacaagggaaagttgttctcttcaactagaaagatagccctgactattatcaacttggccattcttggaattgcttgtactattgtatgttttgtctctctgtgtgattctgaatttcctgctgacaagaatagtgtggattgggactctatgtctcgggcgtggctatcaacgagagctcgtccaatgccagctggacctgtgccaacaatgccacctagactcagttattaccacggtggatatatgacatgtttctggtgttgaaaatggttgctttatatatttgctctgggaagtaaatatactggtgttaaattttacacatatactttgcatgctacaggtgttgctcaatgtctaaagggcttttatcacttgaaaatacaagatgagttctcaccaaacatagtatcacattcttctcttgtacaaattaatctataagacgtcgtcccctctaaactcccgccgaacactgatgtcatcactggtgcactattactaattgtgctttccaccgtggggaggcttgccactgtgcttcgcctctgacaagcccaggcattccgccatgttgaaaaatatgtcaatcgagctgtaaacacctccaaacagctcctgacacgggccacgggcaaagactggcacatccgtcaaagagtggactccctgtcctgcatcaaggggaagagttccattgaccatgaagccactcacggcatccttgtagttggcaacgtatcccttcttcgtgtcctttgtagcaggagtacggggaccctcgctgtgaacccggtaatcctcgcggtgatcagggaaagtaacaacacccgcttgcagggtgtatcgggggtcccattgggcagggaagtggacgccttcggagtaccgcaaggcattggatccggcgacggtgtattgcgacaagccggagttctcatagtnnnnnnnnnnnnnnnnnnnnattgcgacaagccggagttctcatagtatccgaccgcattgcgcttgctgcggtcgtcctcctgcgcctccatgtactgcgtgtcgacggatccggtcacgtcgaaaccgtggccgtggtcagctgtgacgatgatgagggtgtcttcgagctggccaagcttctcgagtttctcgattgttgcgcgcacggtatcgtcgagctcgagcagctcgcctagggaccggtcatagtccagagtgtgcatctgcttgtcgatgctggcggcctcggccatcaggaaccaaccatccttgcggtgtcgcttgtggagcacgtcgattgccttgagggtcatgtccttgagtccggggagatcatcagcgtcgcggtctgaaccgtcggggtagttgctctggttgtagaggttggactggtagacgttgcgatcgagccaagtagcgagattggatttctggaaaacacccagcagcttctcgttgcttggggcgctgtgcagcgctgtgttgttccaggctacgttgtaacccttctcggcgaacagcttgtagtagtcacgcgtttcctcgctctcgaggaaatcctctgcaccggcaccaaggagcacatcgggaccatcccagtttgtccactcgtacttggtcagaccttcgtagtatgagccgatgacatggtcgtattcgccacggtcgctagtgtgagcagcaagaccggcaggagtagcatctgccaaaaaggcagttgacacaatgccaataccggaaccggggtgctggcgacggaagatctctgcgattgtctcgaatttcgggtcatcgaaagcgtcgctggaggagtccacatagacacccaaagcattgacggtagtcttgtgaccggtgtaaagggccgttgcggagttggccgaatcagtaatgaaagagtccatggagtgtgtcatctggtgacccagcacagggaacttgtccaatgccatctttgtcatgtatttgccgttgatactgcggtgggcaatgagacgtgctgcagtaatcatgttggtggtcatgccgtctccgatgaacataacgacgttcttcgcgcgtctcttggtaggaagatcacgaacaaaccagttggcgactgtcttctgctttccgtagtaggtcagagtagcctcgtattcgccgggctcataaagggcgattctcctgtagattttcgaggtcacattgacaagggaaggcgtgtctgcgtcctgtgcgaatagatctgttccagttagcttaggcgttccccgagagctgaatataggaagtcattaccttcataccatgtgaagttccacttttccaactggggttcatcaatcttgaagtactttgctgcagtgacagcagatttacccttctcctttccattgcccttcttggcgatggtgaaggtgaagttctcgtctggcgatccaacacgagcttcagacccattgacgggggagtgtacttcgagacggatgtcgaagtactgacccgctaggaagtcgaccctgcaaatagtaataagtggctagagcttaggtacaattgagacgttacatactgatcaggtgggaagatacatcccaagtcagggcaaccacccaaccgctggaaggtctgggctgccgcgaacgagacaaaacatgccagcgcggagatagaagaggcgcgcatcttgataagccgattgtgatgaaacgtagatattcacatttggagagaaaacacctccgttaaatacaagaactccgcagctgattgcaagcaaaccctcctgccaagaatctcctgccaagacaatctatagtggtatagacacaaatctccgaagtatcccagtcccttgataaagtactattgctacatcgtacatttctttatggggacgaataggagacaagcacgatctgcacgtgcgtaatcctggagtttacctgggaagcttgaacctccttgccaagttgagggaacggaatgccaagccaatccagccaaccccagtcgtccgccaagcttcgagggcttggcagactctcgcacgtgggatggatgggagatgcggtggaatcacgttctctttactgaaggccgttcatacgcctgggtcatttcctatgattggatatatatcaaatcgagaaaaggtaatcctaagcgctcggctgaaatgtccaatgtgagatgaaaatcaatagacaacgtagaaaatgagaatagatagcgcaacatggtgtcgtatagtgcgtctacaatctcatgctatcgtatcattggccctgtaacttcagctagttctcatctccgattcgcaccacccttttttcatatagagggtgggggacctcggctctcgcttgggataaacaaactgcgcccttggatcccagcgaggtcgtacgatccttatctagaagctgtaaagctatccgagtgccaaaagagcctgagtaccacatattctagcacgtgcccctatcatcatcgtcgggctcgttgatacacctgaggattttactgcattggcccggactccggctcatcgattagaccaaagctctgctcaccagattacctaagaatacacgtgataatcatgtcacatgatgggccggtgaacttagcttccaattattgattgcggagcgaagcgaagcaattaaatcataacctcgtgtgcagctccagaatcataagaagctatgcggtggaaagtcatcggctaactttggcagaataacccaaccggcagagatcgactaggcctaatctggctagacgataatttctttcaataccatttcaaaaccttacctttaccgccttctcaatcagttcccacggttcataataaccctcatttctgccagtttttcaagaatcaagatgtcaactctcaaatctttttgggggaaattgatgaaaatgagataaaacggtgaaaactaacaatttttcttcgaggctagcccgcctatagatagtaccttacgcaggataaaagctctacagagggtgcctggcctgtgatgacccggaatgtaactaagtgacttactttactaattctaaaccagccctaagcaattaaatcactaacttatggtgtagactaagaaagaatgggtcgtttatcctgatgagaagtggtgccgttatcctagatgtctacatcaagtgagtttagtttgaaacgattgacgaccacttgaagtagtttggaactaattctcctttactctagactaccttcaccaataccaatgggattaagcaccatattgtacggaaacaaatgactagtaatggcgatatcatgacgtggagtgctggtggttctccctctctggcttcgctccaggtggcaaatggtaagtaaactcgaagattagatctgatctagcttctgactagtttagacgatttccacgagctgatacggattcagtataaacaaattcatacagtttaagaggaacaccgtcctgccctacctttaaagcgcaatggcgaagtaagtattgccctgaactagtcctgacctagttcctgatttctgaatagtttaatggaactgaaatgcgtcgtcagctccatcagatgggtcatactggtgcctgcgtgtcgtgcgaagctgaatttgccaccataggtaagttccccctaccgctaacccttttcaaactagtccatatctaatttataactaatttagcttgctgtactcacgctcgtcgggatcagtgtgattactttgagtatttctctgatgaggggatattgcggaagataagttcaaagaactgatcctgacccagttttgactaccttgacctcggggctttatatcttctggtgtatgacctcccaattagatcgaactgcttgcagtcagcaaaaatggccccaaggcgtgattccataatattagcagggaagccctagagtctataaatagacacaacatatcttgctttttttatggtattaaccttagggctttgaaatcaaaatggacaatgaatcgactacttttatcggatgctcaagatgactgctagtattggacaaagaaacacctctttcaacgcttattgtactaaccaagctgtgctatgaacaattatacgatgtaagaatattttgataatatagagttttcattatcagtctttgaatgaatatactgaaatccgacttgaaacatggaacatacatcctcatagtttaaatttagccctttgattttcacgattctctcaagttcatctctttctctattgtctgattgatcccagttcaaagaaagccggtccaaagcacagaatctataagttctcataatttccaccaagtttgccttttgattaacgacacttgacaccgacaaagtactaatgccccttcaaggtcttggactgatatcgccttttttacagcaatcttcataccagtccaaggttggaatttctaacctctctcaaatgctatctccaactctcaaatacggcagtcgacaagcccttggccggctactacagcaatggatcgaaagcccagaatctgactcgtcggggggaatatgtccgattctgccttctaaactaaaattcaaagacctcaagaagtgcaagaaacttgaaatagatatacagatgcatccttatcttccaattcagattgaatacgaatttgaacaacatggaataatgggaccaaccggcggggcgtgggacatggtctccatagaagaacctgacgctccacgagaccctgaatacccgcacgttcatacctggaaaggacaaattgcgcctggggtactaatgattgaggaaataaagaaaatacccggtttctttatgtcggaagtctgccaggccatttaccagaactacttcccgattgatagcttgaagtatatctatatgatcgacgtttgcaataaagacactcgttcgtttgctataaatgagctctataccgaagccaatggctatacttgggaaaaagatacgattaattgcatacctggaaccccggaattcgaggcgctgctagggacaaaacttggacgaactgtggcacatttggttctgggggccttcaaacgtggaactcgtcggatttcacaaattaaggtctttgataactttgaagctttgcagttggagttttccattgttccgactgatgccccggctcaaagctcttcgactcgtagtacaaggtcaaaaacgcgccgcgagcaaagcatcgaatcgaggaagcgcaaaagagactcgagtgaagagcctgcgaagaagagactgaagcgcgaaaagtgaagaggcgatttttcttaggagttggatgtttactattgggccataggttcttgttcgtctttgttcatcaggtcactttatatatctagaggttttatgctcttgtaacgctgtgtaactattctaaatatgattcaactgttcttcatatggcaatgtataatgagcttacatgttagttcttcttttagggtcatctgattaccttgggcagccccttcccctttcagatcccaacttcccagtttcaaacaacaactcatcaatttaccaagtctaggacagccacggagtattcttttattctccttctaattcccatttctttgctgatcacagggtagctgaatggtccaatatcggctctttgttccgccgagtcggcggatttaccgcactatactcaaagctccttccatcgagacttaacagaatctttcttttttgaagactaggctcttgaattatagtatcttatgagcccaatatcttccgaccgaatcaaagcaatccatgcatcttcgcccctcatggcttccttgtcgttggggcttgggattgcagtgaccaaatcctgtaagtagccaatgagagatccctgaagttgacaaacataatgtctgacgcacttaacttagttggcattgctatatggactgccatcattactccattccgtggccaaaaagggggcggtacagcctacaagcatattgccctgtcttttcgcgcaccctctttcgaaatgcatccgtggagcagcttcagtgagttgaaatgttatcctaggatagaaacatatcttcaaagtccctggtctgacaaagaaacaattcnnnnnnnnnnnnnnnnnnnnnnnnnnnnnnnnnnnnnnnnnnnnnnnnnnnnnnnnnnnnnnnnnnnnnnnnnnnnnnnnnnnnnnnnnnnnnnnnnnnnnnnnnnnnnnnnnnnnnnnnnnnnnnnnnnnnaaaagttacgaagcccacatgagacaactaaatgcctcccccaacatactcgctcttcccgaaggtacaatggcatttcagcttggtaacgttgcttctgagaagttgattatctactttcccggtagcggctactgcctccccgcactaccgagtcacttcagctatctcgaagctctcttcgcggacataagacaatacggaaaaagcatcggtgtactactcattgtctatgagcttgcccccgacaattgcaacaggccgttatcgtgctacagtgcgccatccagacactgggaaaacgaccgtcaaacattattcttcagggtgactctgcgggcgctcatcttctgcgagcgctcatcttgcacgtgggctactatcacatctcactcacccacatcctcaagagatcgtgccgagattttcggttgatgagcctctcggaggagcgatgttgttgtccccttgggttgacttcagaactgatcatccgagctccagtgaaaacgcggataaagacgtcattacggctgagactttgaatagctgggcacggatatctctgggccagacggcggaagatgagtacaactgccctgccaaagcccccgcaggctggtggacagatcttcctgtttcaaaaatctttgttggcgccggaggagacgaagtcctgttggatccgattaggcagatggccgagaagatgaaggtgaggcggcttttacaatctttgcattctatctaacaacttgtcattccaggccgaactccccgacgtgagcataagcattgtgcctggagaattccacgttgagccaatcacgggcttcgctttgaagataccccctggattgcagttcaaggcgatggcgtcatggctgtaccagacctttctttcctgtgaattgcgaaagggaatgaagatgaagacagtaagatgcattgcctgcatctcacgattgtaggtgagtaggcggtcagaccgcgccaactcgatcagggttgggggctttgttcgacgtgtcgacacccgattttcccagaccttgactgcctaacttgtgtgagatatttcaattcatattcttaccactggtgttttacgtgaatagtcagaccctttcccttcagatgcactcgatccacgatccacatgcgcggcccgagagacccggggatcagcctcggaagaagatccgaaaagggacccgcagttgctggcaatgtacaagaaccccttgatacggatgatttattcctaacggttgttttctgcgataggcaaacatcgcaaagttcgttgtatttttgtgtctgatagcgaacagagctgcaaagaatgtctcgcccggggacttccatgtcgcagccaggaattgccggagcctgagaatccccgcgaatcggaccgcacatatctgaacgagcggatggctcgggtggaaaacctgttggagaagcttctgatacgagtcgacggtgggaacagtcaacagggggacttgaaatcacctttagatttagccgaaaccagcctcgaatcgagcccctcgaccgtgacaccagccccggacagtgctccagtcttgtctctttttgacaacgaagcggttcgtgcgataactcgcatcggtcttcaattcccggtagctcccgcttactagtgaatagataggtttcaaacgaaccgacaccgttgagtccgattttacgccatatggcacaattaatcgggactgggggagactgcgccgcgatctgacagcattgataccatctcaaaagacattgaaaatcatatcggaggctagcagtagctggtggcttatgcgcgtgcagttattcggagactacgatgaatcattgctttcgtcctcggagcaacagctttcaaatagccacccagctatggttgctaaggccatcttgtggattgcactgtgtctccaacaactcccttcggggtttgatttgtcctctcttgatctgccctgcctcccatgggtcctggttgaagaatgcatcacccgtgtttccacgctcgtttgctccgatgactctattgttagttgtatcgacgggcttgagtgcttagtcctacaggggttgatctttagcaatgacggaaagctacgaagtgcgtggctttcttatcgtcgggctgcaaacatcgcccagctcatcgggttccaccgtgctgaaccagctcccaatcagagtgtcgagtttcaacaccgggctacgttcatctggagacacatccttatcgttgacaggcatttttccctgatccttggggtacacggcgctatatccaatacggcaatagatctatatcaatccaacccaagagactcccatgatttacccgttcacaatgaatctgttctgaacccgcttgctcggatagcaggctcaatcattgagcgcaatcagaccttcaccgaagtcactccggccatgctgcagatgacacaaagcatcgatatgaaacttcaagcgttcgatccccctcctttggtgtcacccgacaatcttccgccaggcaagtgtaccgagcggtcttcttgttttctcgggcttcactatcgattatggtactaccagctcatggcttggttacacctgcctcttttactagcgtccggtactgacaactcctatgagtataatcgccagacctgtctccacgcctgccgcagcatcatcgcttgttatgtcaatatccgacgcaccactgaaaacggatttgactcgaagattcttgatttccaagccttcactacggcgatgacaattattgtcaatgccctcgggccatttggcccacaggacttaaccaaaggagattacttcgctctcgaccgggttgtggctgttctagaacaactatcgaatactgttcctccggacaagatcgcaactcgagcagtacacgttctgaaaatcatcaaggcaatagggatgggaaccgaacccccgcaactggacgaatcagaaggacaccaatacgagaatggacggcctactcgcatcaagctcgatattccctatttcggcacaatatacctcgaacgtcgttccatgagcgctcaatcatctagacatattgctattgctgttaaaccgccaccaactttgcccaataccgcgcctgggcaatactacccatcatcttcatggatggacacgatgccggaccccggttatccaaatggaaatgttgtggaaacaacccaatgggcggattctaacttgagctttgatccgcctaccgagttttgggctcttaactctgagttcacgtttcaggctccgtttttggctgattatgatgttaattgggattatttggatatgggattatgacgaacgcgtgtaagtcgagcggattgtgccgaatgcaagtcttgtattctttttcctcaatttggtgttttggcaggccacattttgtgttgttcctatagaaagaagtatccttagaatcattcgacgtgccttggacagtccagtttttattagatatgttggtctgccaggtcactttgattcgcccctcaatagtttatttatagtcaatagtttatctccgtgttggagaaagagcagtccggtgagctaatgtcggtgttcattactaggcgagtaccgttcacaagcgatataaagttcactcacacccgaggaatcatcttcattctactcttgatcggatgtcgggtaggaatcctttagaagatatgagaggaaagttattgagttcaaagaacgggcagttacctggagaccgacatagagaaatgtcattgaggttttgacagcccaaaacgacacccaggtataatagatgaaatgagggcgagctgttgctgatgaatttccacacggaaggagaggacgccgtttggcagccaaggaaataatgctagcctaacttattggaagaagagggaagcaagagtgttacgtatgaagatttgtgtctattcaacctctatgaccataattctaggcgcagtgactgaagccatgaagcctgagagacaaacggcgaaaggatactgtcaatacaaaggggccagtcgtcatcccatcgcaaagcacccacagctaagcaatattcctaatacctaggataccatccggatttttcccagtcaattatcacgaggtgtgaaccttcttggtcatgacttttctcgcggaggatgatatttttcctctgcaaatcaccgtgggtgaatgtcgctgtatggcctttaaaaataaaagggaagcatcttcgaagatattccgctctgtagagtgggcccctgttataggtatattttcgtaacattgcttcgttaaggtcttcttcggagtcgaatggaccattcactaatggatctggcttatatgtccaaaatatctcatctaaaagtcgtctttggtcgaaactgccaaagtactttagggatagaagctgacgcaagtcgtcaaagtaactccaaaggtcttttagtatttcttctttctccagtattgtaagttacggccatgctaaaagaggtgtttgaccgagaatacgctctatgacaataaaatttttgcctgtctctaggtctgaatagagggcgaagacacgtgggacagggatatttattttctcccgaacaaataacatattttctccttccatgagattgacacccagtccaaatttcacaataaaatgcgggcctactccgactatttttcgtcctccatattccatgggtatgccaggggcgttttcgatttcggtaccggtgggtcgcgggtaaggcaagtcagttgcatagaacggaatctcaaatgtcttcatcatcgctcaacatcaggcagtcggtagactgagggggagactgaagggtagggcgacgaatcgacaatgggtctttttggctcaccgctctaattaccgtcttagtaattatggttttaggacggttccatggatcaggtgtacgtagttaactatggctaatgtcatcgaattttcgaagtctattcacgcctatcttcctctagctcgacgcataactttacatcgtccaaaaagttcagggaaagaatgctaggtctacaggtatcataaagaagatgacaagtgactgatttaagaagcatcgggcgctatatgatcaataatagagtctaactcaagtctatgaaggaccgagtcggttatatatgctctggaacagagatcagtaagaaattccgttgaatctccgtggaaaatactcaatggacaaggtacgtacgaaaagcccctagcgatcatgtctgggaatatgtctatgacaactcccccgtctttgtggacctggtccatgcaggcattgatatcctcagtcgcagctgagtctaggaaggttaccttattcgttagtagggatcatgtgactatgagaaaaggagaagggtatttacaatatatttcgaacccatgttattcgagcatgtgtaatttgtatagatatttgagaggctgcttaggatacagctgtcgatgaccagcttagctatatatacctgatgcgccaagaacactgacgtcattgcatggttctaacctgaccgaggaactatatctcaacatccaggtggcaactaccattacgtatcctcctgaaccgggtcaatccgtttcgtggcaccgtgttacccacccttgaaccgtatattcaagcaattgcagcaagtaatatttgaatattgccttgttggtcgttgccagggtcattgcgacccggatacgccaattaggtggtttacatccgctctatgtaaggtggtgtgatattgcaatgtccaatgaataagacatcgcactctaccttgcggctttgaactctcgtgtatatatatctatgcgaaataggggaatgggacgccgggtaatcacaacggaaatcagtagtacttgttgtatacgggaggtaaacaaaggaaaaaaggacccacagaaatttggggtatagcaggtggcaggtggcaggtggccgagagatcttattctgaaagtttcgatccttgggatgacaacagctctgtgaagttacaccaagcccgcttgtaagagggatccttggtggagcactcatgcaaccaccggagagccttttggaccctttccaatgcctcatttctctcactggctcttggttggttctggatgagcaactgtgttgtgagcactacagtgctttgcgtgaggtagtggagagaacaccaaggtgagcaacccaagagccaggagatgttcggttcattgggtaggagatcaagcatttggcctgccgcattgaggcagaccattgccattggcgtgtcaagaccagtggagaagacgtcacaacgaagcgcgggttgtgaaatgacaagtttggtcgaataatattgaaaagccaaactcgtgcgttgacggacaaagggtcggtcgtctctaatttccgcgaaactataagtcccaggaaggcgcgcaaaccagttgtcagccgctctgttgagcgataacatggccatttccgtgtcattccgagattttcgtcccgcttcgggagaatacaagatctcgattgcttctctcatcacagctgccaagtcaatggaataaagaaagtacaatgagacgttagcctgaatctgcaggccaggtgatgcctggtgagacatgaacggtgaagaaggcgagtgggctaaagggtcgttcggttcagtcgagggatcaaaggagagtagagaagccatgaggcggcttctggattgaatgtccaaaataagcctcattacatgctcatcccggaagtcttcctccttgtagggcaccggcaaaggggttgtacagtgttcttgctgcattctgggcatacgtccagtcacgacgcagagcaggatgtccaacaggtataacgcccaccatagccgatatctggtttctttggacacgtgtgtgatgctggggctttcgctacgaaggtggattcccatcgcgaccgccgactggattgcaatcccacattttctccatgacctaacccagaatcagtagctatgtaaagactcgcggtgttcgacctacctgttggcctgcccgatggaaagcaagtaaagtgatattagcccctctacctgtgcctgctgcaggttgggattctccaatcggatactctcgctcgtgtgcaattgccaggcacgtgtaaagtacaccgcgtggatgttgtgatcttgagattggtctccggaaagctcgaaatgtcttgcagcgatcgcgaaaaccatattcaacaacgccatccacttgtttccaggatgtgctgtggactttgaatagaatgaccgacactggcttaaaaatatctctttgccaacgacggggaaggaggcgtgggcaacttggaagtacctgtccacaagttcatcggcgaccgcttttgagggatatgcgagagcatctagtttctttatcggcgagattcttgtatcatcgataaagaatgcacaggaagaaattgaaagaggggttgattcctcgaactgaccatccggattggaacttgtcggaccgatcaagcacctaagcctgtataaccatgccgatgccgaatgttctcctgtaaagccaatcgcttgcagggaaatgtctctattaaagtcctccaaggtgtgatccacgtagggaagcgttcgggccgacgaatctgactcatctggtactttggcaagggtcggcgatgacagggaaaggctagctatctgtaggttgttagataaaatcaagaaagattttggctgaccggaatatagactcgctttttcgagagcttggtcgatgactttgcccagctcagtgtcgaataatttgggataaagctcgcgaacgagagattcgtagtgttggagttggctcgttatcactgtaagttgtctaagtcctaggggtgaatattttgggcgatcacatctaggaggatcacagacctagcatttctctctcgtttcccgtcgacatagacacagagaacgttggtctcctgacatcggaggcaagaggggcgatgaccagaacacttgttcttctgtttgcgacagttgtggcatgcctgactaactcgaccagtattgcctacaagaggaaggtcgagtctaggaatggccactttagcgttcatcggctgctccccggcggctcgagggttgttccagggacgatatgcccccaagacgatcggctcccgtggtgtcacggcctctccactctcgagctcatttgtgtagttgaaagggtccttatcatttggggggactgttggaaggttttcagatcgcgaagatcgacgagatggccttccactcattgcaacttggcccgctgttcatggtcagcgcagagtcctaagcgagaatagaaaatctgcgacgaatccgagacgcacaaaccagcttgagggaagcaccgggagcaaaaacctcctttcgcagtgaaatatctgccggtgggattgatggccggagtatagctagcaacaagacttgttttgacaaaaggcatgacacctgtgattggcaggcccacgatcccggttggatattggtcggcgccattggtcggtgtaccgagatgccaacggcccactggtggctggattcaggacaggcatgatagatgattgggatcatctggtgttgaccacatatttcaggggttggctacaggtcaaggttgctgaactgcaaggtgctttttataagaagatgaatacgatcaatgagttcaccatgaggcatcttcaataaatgccagtcggtaatcatgacctcccgaggtcgagccccataggcaaaccttggaacgatgtatccaattacttccgaccaattagagacctcgatgtggactatctgccagggtgtcaaatagagatagacattgatctctatatatacagggacgaccctgagaataagcctccttttttaacattgcgggatactcccggcggctttatatgtctagccgtcccttttccttgaatcgaatattctgtcactggaaatggacctatcgttactccccatatgccaatggcttgctctacaataatatacaaccaaagtttcggctatccataactatctttaacttaatcacattggttgtctcgaaactaggactagcgcggatagctcttagcttgatcgactcttagctttgtagctatcagcaccctcatcacacaccctccatgtgtccgcacacttcattcgccagcctaattcctgcgtagtccgacatgcaggtataagcaggataaccgaatgggctgtaagttgtatggcggtataaaaatgggacatgcaagttattcatggtcggtgacatcatatgctatattacacaattcttctatagtaaagaacaatctagcagagaaagtcaattgaaggtcagattaaatgcattgactttgtattgagaatagacagctttgccaattcacctgaaaggtgtcaacgccaagaccgggattccgctgagatgggatacacagcaatctcctggccagccctatgcttacatagattggcctaaaatgtggggaagtcatagcgatctttgcgtgtgcaccttggcaatctagatgatacaggatcaatgataggttgaatggttgtgatatcgtcatagcctcatttccctgtcgatgacgtagctctggggaaagcttccttcatccgtcgatcttgaaatcccggacaattcttaagttctcttcgctcaacaattttattctcgggggaatcctgagaaggtgtactcgtcttccttctaccgcattgtacagtcaagccaaatcaaccctacaaatagccaaaccctgaacttcgattcgtttcctttttttccgccgctctccaagatggctacaggtcatcagcatgatgctcccaagagccgccgggtcggggagcattggagtggtgccaatcctattccaacaataagtcactttatgaaacatgtcgaagacgaaaaaaaggaacgcaatctcaggatagacgaagaacaccgggctaataaagaaaggattgcacatgaaaaagcgcaaggaacctatggagagcaatcagagcacgcagatcaaaaggatcaagccgagggaggtgctgtcgctcataagccacgcgaagtctcccaggccaggattcgtaccgtgacagacccaactacgggcaaggagatcggcgtggaagacctagatgagacatgcatggatactgtaaataatccaatggtatgtgggatcatatcgaaggaatcttgaacggagtctaatttattcgcagttgacggttccgaatgcgaatcttgggaagcccacggtgagttgtctgtgaatgtcagttcatgggacatatcactaatatgcatatcaggacatccaaacaagtgccgaccaagatcttgcagagtataaaaagatacaggacattaccgcacctcccgatcctatcgccgagggtacaacctccgatgttcccattcgaggagaaaagacgaacgttctgttccaccccacgcctactgtcacgtatcagcctatgtttgacgcactgcagaagcgtaccactggcatttgcattgggatacctgttgccataatcatactagggcggatgtgcgggggatccctttggggtcttgttcccttagccgcatgcattacgagtggaatatggttatggatgaaggaagtcattcgcagcggtcgcgcaatggagtgggagagtgagcatcttcgcggtcagatggtaggttctctattgtatcaccttgttgatggatagagatactgacagttcaaaaggctactgccaatctccttcctgaatctgtggagtggttgaacagtttcctcggtgtcgtgtgggggctcgttaacccggaaatgctgacacctgtggccgacacaatcgaagatatcatgcaagtctctgcacccaaggttgtagagaatgttcgcatcgcagcaattgaccagggcagcaacccactccggattctaagcatgcgggctctccccgatgatcatgtggaaggtttgaaggaaaacatccgcgaggaaaacaaaaagaataaggacccacaggaagctgctgctgccgaagaaggagggagttactacaacatggaagcctcctttgcctatcacgcaagcccaactggtcacagtgcgtcatcgaaagcacgcaacatgcacatgcaacttgtattctatctgggcattcgaggcctatttggtgtgccatttcccgtattcgtggagctgattgaacttgtcgggactgtccgcttgcgcttccaaatgatgcccgaaccaccattcatgaaagatgtgacgttcactttagttggaattccccacgttcgagcaggctgcatgccaatgttccgaacgggtgtgaatgttctgaacttaccgttgatctccaactttgtcaactccgccattagtaccgcttgtggcatgtttgcagcccccaagtccatgaccatggatctcggcatgatgttgacaggagatgacatccacaaggatactttggcactgggtgtgatgtggattcggattcaccgcgctgttggcttgagtaaacaggatgctcgcggtagcgagggtggcggcagcgacccatacatcaacctgtccttctcaaagtatggcaagcccatgtattgcacacgtgtgattacggatgacctcaatccgatttgggaagagactgccgcccttcttgtgacgccggaattgatcaaggccaatgaaaacctgagcatcgagctctgggactctgaccgcaacaccgcggatgatattgtcggcaaggtcgagctacctatccgggagatgcttcagcatcccagtcagatgtatccccaggtctcgaagctccagggtatggatcagggcagtgaaatgcccggtgagctgcattgggaagttggctacttcgggaaaccaaagcttcgccctgagctgcgtactgatggccagaagaaagaccttcctgaaaacctcagaggcgatccgactttcgaagacgaaaagggggctatcaaaaacgaagaggaggatgccattatgcatacaccacccgatccaatctggcctagcggtattgtgcacattgttgtgcaccagattgtcaaccttcagcttgccaatatcaagggcagtgatgggaaccgcaagggcaaagagtatgagccagcgaagccatatggtgagaacacagaggaggaaggtgaagatctcccaacgagttactgcatggttttgttgaacgaccaactggtacgtatttgtagacatactagtccactccaaattccagatactaacagtatatcagatctatcgcactcgtgcgaaggctgtgagctccaagcccatcttcaacgcaggaactgagcgatttgtccgcgactggcgctcagctgctgtgaccatcaccgtccgtgaccaacgctatcgcgagcatgaccctatccttggcgtggttcctctgaagctatctgatatccttcaaaccagctcacaagtaacccgctggtatcctctcgacggtggtattgggtttggacgtatccgcctttctcttttgttccgccatgtggagaccaagctgccaccttgcatgcttggctgggatgtcggcacctttgaatttgctggacagaacatcatcgcgaaggactttggtcgacactctaagatcaagctgcgcaccgggggcagcgttggcaagatcacccggcacaagtgccacatggaaggcaatgacgcgatattcgatatctccgatgacgctttccgcgactcaattcgcatgcctgtaaagtaccgataccgctccccgatagtattcgagttccacaacccgggcaagcgaggcgcagccgcatacggtattctgtggctccaacatattgtcgacaacgaggaaacagacattgacattcccatctggacaacaaagatgggcgctcgcttgacacagaattacgtcacggaggagaactggaaggccaagcaggtacctggactcgaagacttgacagaggtgggacgtctgcaattccgatgcaagttctcaccgggcattgacgaatcacacgagctcttcgtgattgacaacgactcccgtgagaccttcgagacgtgggaagcgtgcgtgtcccagggtgtccgtaccagcacggtggaggtcgaagttcctcctgaagtgcaggaattgcacgagcagtctctgatcgaaggacgggacatcttgaagcaagcctcgccctctgagcgtcagcggtggattgaccacgacggccaagactggagtggagcgttcggtcaagacccgcgggcgtacactgattccctcggacgcaaaatcgctgagcctggccgggaccaaccgccccatgacccgtacacccctccgcctctcaaggatccatcttctcatcgatccagttctcaatatggagagcaccacaacgaggacacctcggagtcaaatgacgagctcgagcccttgtcgagaggaccctcgaccatcagtggcagtggacctgggacgtctgcgtcacacagcaatatgagtactcgccagatcaacaaggcgaataaacacagcgagcagcgacagcagcgtggtatgatgcagtggcggcctgcgcgcaatgctgcttttgctaaagatgaggccaagtatgcgttccggaagatgaagaagaagatcggtgctggtggtctcactggtcgcgagccagatgtcgagacggagacttgacgatgtatgatgttttatgtttcggcgttttgtatgtcctttgcatttgcatataaaatgtgaatatagatttattatttactgtttaacacccacaagttaactattgaacgcttatgactaccattcactaccatgtagatgaacctaagaatggcggtgatgccttataaaagtttaattccagatttggtcaagaattgaattcgtgaactctgctttctgtcctcgttgttttattttgtgccttatgagattgggaaaagtatacatcgaaaggatataatccatagaagatagaatgatagaaaaccatagccagtgaagaagaaaagaggcgcagatgcgccaaaagaaaccggacaaacccaaacagcgcctctatacaacatgattcgtgagaaattatatgcatcgccattatcatgcaggggaaataaaaggagacatcagacaaaaaaagacatcaggcataaaaccatgaacgtcacataattaacaatcgggcgcaaagtcggtggatactcggagagactctgggccggaggtaaccttagccgcgttcaataatgagacattctcggggccattgatctcggccctatcgacaggcccgagagtccatttccattccctccgacgcttggcccggccctgcctgggcgtgcgcggcgtcgaggagccatccgcctcgaagccatcaagcaaagcgacggctcgcacctggcgctccgcacgcatggtgcggcgctttttccgctccgtcttggagagcgaagacccgcgcacgccttcatcggcactggtctcatcgccggaggcactccccgataaggacgggctgttatcggagtcctctttttcgccttcgaggtgcgggaagggggcggggcctgtctcgggtggggttttggttctggcgagtgcctcggttcccactgcctcgtctgactcggtcacgagatccaggtgttgcgcggtgtagcattctgtccggatctcctcctccagtgggtaccggtagctgacttgtttctttgctgggaagaagacgcgacgtgagccgccgccgttgggcccatttccgcttgctgagatggagccnnnnnnnnnnnnnnnnnnnnnnnnnnnnnnnnnnnnnnnnnnnnnnnnnnnnnnnnnnnnnnnnnnnnnnnnnnnnnnnnnnnnnnnnnnnnnnnnnnnnnnnnnnnnnnnnngggcggagggttctagtggggagttgcgtaaaatgctgcgcacgccgatggggagttgatatgggcggtggttgaagatattattgttcgggtgtaggatgtagggagaggccggtttgttgtagcgcgtggatttggagggggagggtgcggaagatggggatgcaacttcgtaggcattcttgaaggtgtttcgaatagtgggggatgaagttggtgctgttgcgaaggaaaatgataggccggtcgttgaagtgccgaatgtgcgagggagcgcggtggtttggagggtgagttttggtcgggaggtcattgtgctcgtcgcttcagacagacacgacatggtaaaagtagagaagaatcaaatgtgtgtcatctcagcccaagaagaaagaaaaaaagaagaggaaagatgtttagcggggttgaactaagaatagaggaggttggcgcttgggatgtgatgaaagatgcatgtcacttgcacattccacgacttaaaaagatttaagattaacgtcaaagtgctttattcagagtatttaaaccatctccatggagaattaccccatatatactccgaagtactccgttcagcgcaaagcagagatttccatagcaattccagactccagtggatgcgtaactatcgacgccaccatccacactaatttcggtttttctattttggtagtatagcagatgttgttgtttatgtcaagagtatcttatagagtattttaaggtatttcctgaataaaaacaggatcaggagcaggatcagagagaaaacgcattcgtctataaaaagaacagggcccgtgggtctccgatctacctatacgggtatatgcctggtggcaaagacctaaatatggtgggtttaggtggaaatgccattttgcatgtcttatcattctttgtctgcctctactttgcctatacagactacattatacctaatataaagtggcactgttgtatactacacgtgacgctggctgcaagcgtcgaagaggtattcgagatatgattggtgggaaatcgatccaactgcaccggattgactagttctatcttgttgctgggggcagggtaacatcagctccacccaatggcgtcgatgacttctacctggcattttccactttcgtgcgatgccggaggaaagcgcaaggactggtcgactaggatgaggtagcacgggatctcattgagcatagatatctaaaatgaagaaaagcagcttagaaccaataaaatggagtagaataatataactgactagtaactacttcgtgcatgaactaccaggcaccaaggccaataaagataagccaccgacgccacaccagccacaaataggccccaatcgtgaagttgcctgcggttcctgttttcagcgttcgatcgttgccaggcacccgcaaatcaaggtcccatggacacgtcgacatcagctcagagttcatggctgcactagtgcggaacgacgatcgcatcatcctccacttggtagctctctccactcttactgccactggccacgctttgactaacccatatccaggattatgactgtttctatgcctcggtcttcgaggtggaacaacctgcattgagatctcttcctttggcagttcagcaaaagcacattgtggtaacctgcaactacgaagcccgacgccggggtctgcacaagttgcagctcatcaaagatgccaagcgcatctgtcccgatgtggtaatagttctcggtgaagacttgaccaagttccgaaatgcttccaaggagctttatttgctggttcgctcctttgtctggggcggccgtgtcgaaaagctaggctttgacgagctttttctcgatgttacggaaatgattgactacaacgctggcgtgttaaatcgaaatgatttaacgaattcgtatttccatcttgatcggaatgacccgaccgttggtttttcctacgatgccactcgcttccagggatcgacctttcccgcaacggaggcagccgctcaaaacgattcgtcttcgttggaaatgaggttgctcgttgcctctcatttacagggtcatatacggagtaagatagagcatcaaataggcttcacggctacgggcggaatctcaacctccaaattgctagccaagttggtcggtaatgtccacaagcccaatggccaaacgactcttctgccgccatatacggcgacggaaaataatactagcaacgtgttccagttcctggatgatcacgagattcggaagattcccggaattggttctcgcatcgccgagaaactgaaatcccatatcatagggaaagagagcgtcggcgagaagatcacagtcaaggatgtccgccagttctctggtatgagcccatctttgctggagagaatcctcggcgggccaggctctgtgaaagggatcgggatgcgcatgtggaacattctccacggagtagatagttccgaggtgctcgagggtcgcgatgtgcctacgcagatcagcatcgaggattcttacgggcggttagatacgcttgagagtgtccgacgagagctcgtagtgttgtcccggagtctgatccgccgcgtaagaaccgatttgcttgatatgagtgatgacactgctcctcaagggagatggcgtgctcatcctcgcacgctacggttatcaacccgaccaagacttccggcagacttaggtaccaggcgtgcatacagttccaatcgcatctctcgctcagcacccctgccaccctttatcttcaatttggatgagaatatcgatgcattagccgtacggctggtccgggaaagtgtgttccctatgtttcgcaagttacatcccgaaaaggctggctggaatctcagtttgttgaacgttgcggttaccaatatggtggagactgcgggggaccagaagcgaagcagtggccgtgatattgggaagatgtttcaacagcaggagacagtactcaaggattggactgtgcaggaacccgagccctcgtttgctaatccgcagttacccgattcccctgagatagagtcacagtcggacgatggctgggatgacgatgaaccctggagtgtggattgccctatatgtggggtgtcaatcccacactttgcccagttggcacatcagatatatcatggggatcatgaatcacagccctctattattcggcagccttaaatgccaattaatgccaagtgtcagaaattcttcaataggcttccaagcgtcttggcttaagccacttacgcgttataccagtacatactatgagaaagactattacatagttcccttggtttccttagttacttactgaagagtctcgacgttaacgtgttgggatatatatcgatgatggtatactccgcacacttcaatatcacccatggatgctataacctgccaagcaagcaagagacaatatgattggatgaaataaaaataactctctctctccacagaaccacaggaaccagttatcaatgcgtgcaatatctggaagattaaaatggcacttcgaaattgtttcagtccactttgccaagccaactggatcgaggattcctaagcccttggcagtgagccctgtacagccccggcattatctgatccctctgcctttcctttcttcactttctggtttcttgaacttctagtccttcgttgattttggtttctctcttgaaacattccttttgaacccctaaacccctggtggacccttaaaatttcccttgccactcagggtctcggaaactctattgaaaagaccggggaaggaccctgaattctggatcttgcgatgaggttttctaccattctgcccttgatcggtgcattgtcatcgctctttcaacaaacacaaggtaaatccccacttgcagcccagaccgtcgttgcccaggcctccgttgctcagcccgttgctcagcccgttgcctagctccgttgcctagccgctgacaatccccagcacgatcacaggcctcaaacgccattcgccgagtgacgcccgtcgacaatgccatcattcgtactccttcacatcaaatagatcacctgtcacattttgatatcacgttcgccctacaccaagacggcaagcgcataaagctagaactcgagcccaataatgatatcttggccgacgacgcttatgtgcaatacgtccgtaacgacggcacaataacacattctgagccgatcaagcgagacgagcacaaggttttccgcgggcgcgccttggtaggatccggaaaggggagatggacgcccgtaggctgggcaagaatcaccgtccaaagggatggcctcgagcctttatttgaaggcgcttttagtgtcaacgacgacaagcaccacattgagctgcaatcgacctacctcgacaaaaagcgcccgatggatgccgacgtcgaacccagagatgggccatcgatgatcgtctaccgtgactccgacatgtttcgctatacgcactccgagctcaagcggtcgctgcccgtatctgaaggctgcggcgctaataaccttggatacaatgctgatctgtccaatacgattttcggggatatggacagccaatggggtgtggtttcgttgaactcgatgttcggattaagcaagcgacagtccgatgttggtggtgtctcgggaaacactggcggtgtgaatctgaaatcgaccatcggtgattccagtggatgtcccaaaacgaagaaagtggccctgatcggagttgctacggattgtgaattcaccgaatcctttatggctacaaactccacacctgaacaagcggctagggactgggttatcaacgtggtgaacacggcttcaaatctctatgaagaatctttcaatgtgtccattggtttgcgcaaccttacaatcgccgagacaggctgctctagctcgggctccgctgctacgccatggaacgtggattgcaacggcggaaatgtcacctggcgcctgaatgaattctccaagtggcgcgcaactcattcagatgacaatgcctactggactctgatgactaactgcccaacgggctccgaggttggggtttcatggatgggtcgtctatgctcgtccgaactggttacctctggagcgaactccgtggccggtgccaacgtcgtagtgcgcaattccggttcttcctggcaggtgtttgcccacgaaaccggtcacacctttggagcagtgcacgattgcgacgagagcacctgcgcggataacctggaagcctcgtctcaatgctgcccgctgagttcgtcaacctgcaatgccaatgcgcaatacatcatgaacccctatgctgagagcaccatcaccaagttttcggaatgtaccatcggtaacatctgctctgccattggcaaaaatagcatcaagtcctcttgtctatccgacaaccgcggcgtcgtgaccatcagcggcagccaatgcggcaacggcatcgtcgaaggcgacgaggagtgtgactgcggcgacgaagaaagctgcagcgacaactcctgctgtgaccccaagacctgcaaatttaaaggcagcgccgtgtgcgatgactccaacgacagctgctgcgatcaatgccagttcgcctccgccgacaccgtctgccgcgccagcaccggagaatgcgacatcgccgagacctgcagcggaacctcgagctcttgtcccgccaacaaatacaaagacgacggtgccagctgcggcgccaaggaccagggactcagctgcgccagcggccaatgcaccagccgcgactaccagtgccgcacagtaacaggcgcggtactgaacaccaacgacacctgggcctgcgataacacaggcagtccctcctgcagtctcgtgtgcggcgcaccctcatcccaacaatcaatgggtgccacaagttgcctcatcatgaaccagaactatctggacggtacaccctgcgactccggcggccgctgcagcgccggccagtgcaagggctcctcggccctgggctggatccggcagcacgagaagctggttatcggcatctgtgtcggtgtcggcacgttcctcctgctcgctatcttcttctgtatctatagtcgttgcaagcgcagtgcacagctgcgtaaggcccgcaaggctatcccccctggcacttatcgccgctataatgggccccagcctactgcccgcccgcctatggaccagtggcatggataccggaatgccggctatcagaatatgcctccccctggttattccgggtatcagaatgtccctccgcctggtgtcccgtatcaaaacggcgggtatcagaatatgcctccccctggtcccccgccacgatacgcatgatcacaccactctgcttctagttatattacagtttatgggttttattgaaccttgtcttgtttgcattcgggcctctgggatttgatctggaggatttgggtatcggcgtcatcgcggatggttgtctaggtggttattatcagtcctttcgcatggataatatcatctgcgatctggggttttgggctttcccttcttgtgggtacttcttgaatttggatgcatttttcgtgaatagattatgtcgaagccctttgggctatgaatgataccgaattttcaccttgcgagagagcatgtagatgtagaggaataaatatccatttgaagtgcgattttgacccagaataaacacagaggcactgactccaaaaacaagcacatgagtaaaacgacaagagaacaggaaaagtacttagatcccaacaccaaggaaaaaacccatgtacaacaaacaaagtcaagtcatgtcaagtctcagtctccgagagcaaccgaacccatctaacaggattcaaccccaaacaagaccttagacatccaactcattgccaacaaatcccaacaaaagcctcccgagtaacaccaccaacgccctcaagatcaaactcctcaatcatagctctaagctcctcctcctcaagcccagtctcccccaactccctcgcaacacgcctcaaatcctcaaggtcaatgaaccccttgccgccctcatcgaacagctcgaacgcgcgcaggatctcgtcgcgcgggtcccgctcgaggatcttcaacgccgtgacggcctggaacgacgagagcggcatgagcagattggacggatgttgcgggttcgagacgggccctttgttggaggcgaggggttgggattgggcgtgttggttgccggcggcgccttgttgttgctggacttggggacggggtacgccgtacgttgttagcagggagatgagctcttgtttgccgagtgtgaagcctagagcgcggaaggcgacgcggagctcgtggtagtcgaggtggcgatcgcggtcgaggtcgaagagggtgaacttgaggggtttgggttagctgggggttttggatggggtttggttgttgtggtttggtttcttttcttttcactcttggagggaggtgagagggaggagggaggggttgcaggatattgcagtaatttaggagaacagtagtgtcatagatgggtggattgggtatcccttacagcttcgttgatctcttccctctgctcttccgtgagtctgttcagcggattcgcgtcctgcgctgggccatgggatacggcgtttgtggcgggcgcgggcgcggactgttgcatctgcttttggccatctggaaattcgccttggttggtatttcccagaccgcgatgccgtgagaatgaggaggcgctgaagggcatcgcgttcgtgttgacggagcgttctgggagtttcgtgccggcgtaggagcgcgacgcgaagggttggccagaggccatggtggatggcgtgttcagatttaattagatggctggatcaacagttcttcagcattgatttgagtgaggggctcgcagcccatgagaatgcgtggagagatgaggtgtttggcggtgggaggattctggagacgcgccagacgcgggcggaatgacaacgcgctgttttgcttctgttacagatgtagtggtcaatgaaaatattattgtttcttggaaattctgggttcaatttattattgctagaaggatgagcgagtgagcgaacttctagacacagcacaacctggtgctaatcacaatatcccaagctgccaacccataaaaactctttaaccaccacctaacgtggttcctcaaacttcctcaaacgagtgctgtatgttcctcccaaggacaacttgttaagaaaaacaatagtggtgagcgaatgttgctgttgccggaggtttcaacaattgtacagagatttttggaaattgccataaagtggcattgtatcgggtggcattgtatcaacaaaggcggcacccattggatcgaatccattgtcgtattcactgttgaggatgtccatcagaccattcggatccaggcttccaacttgatctggataaattacgctatcaaaggaattctgttcctgggcaatcaccgtgtcgtgcgaagtcgctgataactgcaagagcccgtcgtgctgctcatcaggattcgcaaagcgaggtcgagggaaatgatcagctaggaaggcttgcatttcgcaggctggcggcgaaaagggaccgtcaggccggcccaaaacagacgacatttcctcgaggtctcccagccagaaggccatatccaggcttggagacgacgggagactgggaacttcgtcctcaagaatcgttctgatggaggatttcccagtagccccgtgtctgggggacacattgcgcaggatatcttcgagtttttcccgaacaccactcagataaaggcgaaaggaaccgaatattctcgcgacgattgggctgtattgaagatcttgcaagccgcacgtaactcggtagtataatgctgcagcgacccaagcgggctcgatctcattttctttccctggtcggtttttcttgttgctgttctgcttgtcctttccgcacagagccacgtacaaaccagggcaaaagtcctgagacatctctgcgagcttccgaaacgagagaatcaaaagataaaacgagacgagtcgcccggtggtaacatcaaaccaggacgaacggattcgagcttgcaccaagccttgaatggccataaacagatttgccattctgagcgcagtccagacgagcgggttgtgtttgtattgatcttcaaatttgaccagatccacgaggggaagggcactgataagcccagtaagaaaatcatcgacagggcagtctgttgtactagatagtgcgatactggacctcgtgactgtccaatgccatgcagtgcagtttccgccatatgtttcgcggatattaacaaccgcgttgaatgcattcatgcgtttgaaaacctcgtcacccatgcgttgcaaagtatctttcgcctctggggacgggaagctaaagatcgtaagagagccccccgcaggtggcccaagcagacatagatctccccaacttcgaaagcagattcgattacccttagaagagcatggaggacatggtgtagttgttccacactttttcttggcccggtagcacgccatacatgagccgccagctttcctgagtgcggcggtatcttctctctgttgcagaagttcggcccggttacgcggaatcttttcgcggatcttatcagacttctcagggttcgctggatcccacgggacgaagccatcgggatatgcttcctcgagatgaggagatagcggacgtcctagcgcagataatggttgtgttctaccgacaccatgttcactccgagcacgctcatgttcagtcgagacgcgtggcgaggtatcattggcattggaaggccatgttgagggtcgaggattcgagcttgtaggagatacggagctttgtacttggtcttgaatcgtgggaggagtcattattgaatcaaaacaatctgggccgccaggcatatccagcccctgaggttggtcttcaatcatgggaggcgtcattattgaatcgaaagaaactggaccaccaagcacatctggccccgggggttggctgctagacatctggagttgaatgtttaccggactattgtcgactttgttgggcattttgagtatgtctggatctatgggctgggtctcatatgccatggccgtcgacgacagttgccatgtctgtgacattgtatgctcgatattgggatcgggaaagtaaagtgtggctgatgcgagtggagacatggcagactgaaaggtcggtatcagtatcaataatccacgagatgtgcaagcttagaatgaaaaccacagggacataggaggacgcggtgggagatggatcgaactcacaggatagatggaatccggtgtacgtggtgtacacggcgcatatttacgcccgccatttggatgtggagacaatggagacggctgatgccgtgtagcggcttgagccatcacggtttcaagggtgaacgataggaaaggtaatgatggacaccctgaaaagtcctcgagcaaagagtgagagcgaaaggacgggcttagggcagagcctaacagcaaactgatgcttgtaccaacaagttgtcaatcctttgcgaagggagagaatgagtgacgtgaagtaaagatggaacttgagatgcacttgggggcttcaaaaatactcaaaacggactagtaccgttaggaaggccaaacctttacccgaaccttagcagaaccttgaacatcatagcgagacacaagggcatcacttgaggtgaagcaggcacgactaggcccatgaggccgattccaaatccggtatagcccatcgctaggtataaggtttacatggtttccagggtttaggggcggaaggagtatgagtactgccatgtgaataggcctagatgtgatgtatgggaagaaagatgtgagcaaacaatggagacaatcaatctctttgatatgaggtactgtccaaatcactgtctctccgcgtacctaaatccaagtcctctaggaaggtacgaccgaggagttgctcgggcaggtaatcctgttgaaccttgccgtcgacatagttcggattgtacttatactccgcaccatagcctagctccttcatcagcttcgttggcgcattccttaaatgaacaggaatgggcaagcccgcgattcctggctcgttcaaggcggcaaagacgttattcaagccacggtacgcgcgagtactctttttcgatagcgccatcgccacagtagcgtgtgccagattgattcgggcctctggaagtccgattttttcaacagccgaatgtgtggatatagcaagtgatagcatagtgttgtccgccaggccaatgtcttcggaagcgacaacaatcagtcgtcgagaaatatacagggggtcttcaccggactgaatcatgcgagcaaggtagtagagggctgcatctgggttgctccctcgaatggacttgtgaaaagcggatatcgtatcataatgctgatctcccgcacggtcatacaccagcgtcttggtcaaagatcgtttcaggtcctctttatccattccaggtctttttgacagatccatggcaagctccaacaaattcagcgaagtgcgagcatctccatcggaaaatttggcgagatactgaaccagctcttcgtccaccagttcggagggcgaataattcgggccttcaactcggagagcacggtgaaggattgaagtgatatcctcgtcagtgagcttcgcaagagtaaatgttcggcaacgtgagagcagcgcattttgaaccttgaacgatgggttttccgttgtggcaccgatcagtgtgacctggccgctctctactgggcccaagaacacatcctgttgtgactttgaaaaccggtggatctcgtcgcagaagataattgtttttctcccagtgagtcccagctcactacgagcttcggcaaatatcttcttgcactctgctacgccgctgctggtactgtttatttccacgaatctgctgcccaccagcgacgagatgactcgagcgattgttgttttccctgttcccgcgctaccccatagtatcatactcggtactcggtcctgttcgatgagtccgcgtaggatgccgttcggtccgacaagttcttggccgcagacctcatccagggttttaggtcgcatgcgttccgctagaggtgctgctttgtggaaggcgttgatcctgggacgctttgcctgcggctctttggattcaccatttggttgcttaagcacatctcgctcccgtgtagattctgcttcctcggtaaatgatcgcttgccggtgagagcacgtggggttgttgtgggacgcgacggggacaccttcggaatactcgactgggcagaagctttgcgcgcggacggaggttgaaacatgcttgggactggtcccttctgagaggatgccggctctcctggagaagacgacggttcttcgatgaagctctggcagcctgagtcgatgtggttattgatcttcaattgggagacagattgatcgcatattgggcaggaaaccatgatgaccggagaatgatatggtcattcactagattccaaggttactcaaagacttcaaggtgagataaacgtcgaggcgataacatccacccgcgggtgcgacgcgttcaacgcgttaattactaagtaagaggccttggtgcctgaaaatggggcaaatgacagatctacctaactgtatgaaaacatgacatgtagaatatgtagatactacatacatctactcaacaagtacatgcaagtactgtataatctccgaatgctccgaatataaaatcaagtcccgagggccgtcagagccgaatgcggagcacgccatggtggggaaatccgacatctctatctattgtcctctctcctcttattcccttcaatatcgctcatgatttcccgctcctttcggcacatccttgctcaatcacagaattgcaggtctagaacccttctctctgccctttcgacattaccccgccctggttacagcacaagagcgatgtcggctacagcttcgcgacccgatccatttctccccgcccagcgggtggcaggacagcgccaggatgtttggtatgccgtttcggaaaagaagttgggaaagacatactaaactgagatccaaggtcaatcgtcaacgaagccgccgcagcttcgccagttcagccgattgtgaacatgggccagggattcttgtgagtcacaccatttcgaggacccccaattaccccaagggatgggaattgacgggaaatatttgtgcgcagtggctataaccctcccaagttcgctcttgacgctgcgaaggctgcgctagaccgagtggaatgcaatcaatattctccgacgaaggtagagaacgccaacgaatctgcgcatggttacacaggtgctcatacattatagggtcgcccccgcctcagacaggctattgcggatgcttactcgcccttctttggcaagaatctgaaccccgagaccgaggtcacgatcacaaccggcgcaaatgaaggtgagagatcggcatagtttatctataaatgcatacttggcactgacaagcgacgaaataaaggcatgctcagtgccttcatgggcttcatcgaggatggtgatgaagtcattatcttcgagcccttttttgatcagtaaggagctccaacaccgcgagaggattgagcggatactaatttactcggaatagatatattagcaacattgagatgcccggcggtaccatccgctatgttcccctccacccgcccaaggatggtgccaccaagacctctcctgcatcggagtggactatcgactttgaggagctcgaaagggccatgaaccccaagacaaagatgattgtaagcatgcgataccaagattctcatgaatatccaagctaattatagcaggtcctgaactctccgtaagcagacctgatttacagagacgaataaggtctcaactaactttgtattcatagacacaaccccgtcggcaaggtcttctcgcgcgaggagcttgagcgcattggtgaactgtgtgtgaagtacaaccttatcatcttgtctgatgaagtctacgaccgcctcttctacgttccctacactagaatcgctaccctgtccccagagctgtttgagcgcactttgacagtgtgctccgccggaaaggctttctacgccactggttggcgtgttgggtaccttatcggccccgagcacctgatcaagtacgtgtccggtgcgcacacccgtatctgttacagcagtgtgtctcctctgcaggaagctgctgctgttgcttttgagcaggcagagaaagagggcttctgggacgagagccgaacagacatgaagggcaaaattgagcggttctgcgaggtctttgatgagcttggtatcccggtatgtgattattcacccctatgtgccaagtctactctcccatatattgattttgctgacatcaatctctccagtactctgatcccgagggtggatactttgtgcttgccaacctggcctctgtaaagctcccggccgactatccgttcccgccgcatgttgctagccggcctcgtgatttcaagctctgctggttcctcatccatgaggttggcgtggctgctatccctcccactgaattctacacggatgccaacgccctcattgctgaggattatctccgctttgcggtgtgcaagaacgatgatgttcttgagactgccaaggagcgcttgaggggactgaagaagtatatcacccagtaaacaaagacctataggcctttcatatgtgagaagtgacgagatatgcatagaagtgttatgatgccaatagaaaatcggatataaaattgcaaaatatgtgcacaaaagccaattctttcccacagggcaggagtggtctgtctaattgagtcttttcctacttggttaattgtaaaatcaacattcggccaatgatgccaagttcattttcgatcacgtagcagccatcgtcgttggtaacatccaaactcagctatatatatatatctttccttaatgatcaatctactagtacatccatatttactcatgtacagctaatcctacgtaacttacggcacctgagaacaaagaaccaggcacagtagggcaaaggcacaagcacacgacggtctttgtttcaatctagaaacaacgcagggggcgatcaactccccctctatccccacgccactaccaagagcgtaatacaaaaatgggcatcctgaacctggggggcatccaccgactgaactgataatatctctctccaaaccagctaccccaggtccaggaccccggtataaacaattagggctagagaggggacggctccctaccctgaccccggcatctccagctccatggggcccgctcccaccccgtcccaaccgataccacggtggaatgtccgccggtcctcggacaggacccccgggaatcctccgccacgcgtgcgagccaccacgtcgctcaccgatggatgggtggctcggtgcgccctcagaatccaatacttggattcgagggattcgcacactttccggaagcccaaacccatgtcgtggttaccgagcaacgttgggcgacgctcgctcgcgcagatcagattcccgcagtggcgtcggtcggcaccgatccactccgtctcacaagcatgccgcaaaccaagacggctctgatcgatggcgccacccatctcgagtcccatctggtaacgcagcatgctgtccatgtccttgtcactggcccacatattgtgagcccgcatccagtcccgtacaagccggtaaagaaagtccactagggctggatgttcaatcgccgctggaagagaaaaagagttagcatatgatctgaaagttaggcaatggtgagggctgtatgatatcaaaatgcaaggaaacagagagtggcgtgaagctgaaggtgactcagagtgatataaaacttaccgaagagacaaattgcaaggcaccggcggaaccggtccttctcttcggcgtcctcgaaccgcacaatatgtgcgattcgaggtgaacatcgcagctgcagatgactggctggatcgtcctcaaccttcaccaggtcgtcccactccgcgaacacgaagtagtcacctcggtcgcgggcagaactgaaccacagcgcctgacgatggcgctcaggtttgtcccactggtgaaggttgggaagcatcggtggacccacgagaaggtcgtgagagatcgaactggccaagcattgttccaggaccgggagctgcgtacaaactacccagtgtctcttggcatcctcccacaggtggtccttgccgcagtagcggaccaaggaaaacggtccgcacttagggcaaacaacggagaccccaacccccagacaacagagggcttcgcagaatggctcatggcaagtaacgccgagcgtgcgcaagtctaacagtaatccagggggtggggccccggtgttgccgaactgcttgactgtgggagtcagttcattatcctcagacaactcgggtggagacggagaatgaccttccattccattggtctgagaagaagcaggagagatggggagctcgacgtccgcatcgcgagcttgctgacgcttcatcaattcccgaagcttccgtttaccttgcttcttctttttgtagacaatcctcttgccgggtcggctagactcagctgaagtttggtcatatggctggatggtgccatctgaactgggatcatctatcccaaactcagccgagtccgtggtagacaaggcagacgaggcacggggggtcaatggagggtcggtcgtttgggacgaggatgtcatttcctggcccctgtagagccctatggttctcggttagcttgtcttcaagtaaaaacatgtataaaaagtgattgcatacctagactggccacactaaaagactcacttcgatgcaagactggctcctgcgcctcgtggtcgccatggtactcttcagggtctatataatagtcaacaggtgtatcaacatcgatataaatggtaaagagcttaccagaaaaccataccttgtccctgttgttcgagacagggcaccgaagcccagcctcacctccctgtggagtcaagaatagctcatctgaagtcgctgctggctcgttctcttccgctttcaccgactcttcgccatcatcctcatctattctccacaaggcgctcgtaggtgtgcagaaagatgacattgtggataaggtgaggtaagtacgaggggagaggtgggttcgagctgtctcgaatgatggagacaatggggcagtcaagtcattgggcgtagtagggaacgcgggatcgcttattgtttgtgtttgttggccagcaactgccgcaagttgctgcttaatcgggacttcctgtagagcgatgccatgcactcccggaagtaggtcgccacgctggtcgctgccgtgctggtcgctaccacgttgctctgtaatacggtctgtgatgcggcctacattcttctttcctacatccctctttcctgtgttggagctagacaaaccaggcgtgcactttccctttccctttcccttacacttgcccttgtacctcttgttgctcttttgagtatcaatcgtgagtgcagagaccttcttggtcaactctttctgggtcgcctcatgctgggctgactcttgttcagtcaactcatactggttcaactcatggctcaacttatgctgggtcgcttcttcctgggttgcctcttcataaggggcctgtttctgggtcgacttttgacttcccattgtctctatcgtatgttctcgccctagcaatgactgttctggatgtgacataactgacgcatctggcttttcttcctcagagttctcttcttcgactgtggaatgctcggggaccctctttcgggatttctttgatgccttattccctttgatcttcttctgaatggagaaacgggaagtttcatcgacaagcaacttgtcaaacagtttgttgtctatgtcttttgtccttgacatcagccattgaatgcgcagccaaatttggaccggatatgccatccatttgccgtaagtgttctgtgatttgttagttaaacccgaagaatatcggtgaaggttttatactgacagggtctttcttagagatcttttgataaaacttgtcacgcccatcaacggtgacgatcatctgctctacaggtcttctgatcctaccactcacgaacttgaacttcatggtgggcaatttctctttcgctttcatccagcttacttggcagctggatgtctcccgtggagttgtccatttgatatggtaactatgtctttccatgttctttgactctcgaagagccggtgcaggaccagtctcgatattgctcatggcaatccttttggggcactcgaatagtgcctcgatcgagcccataatccccatcatgccgtctgggtaattgatggggatcctgaagtcaacgcggatgatctcggagttttcaataccggcctcaaggtcgcacttgaggttaccattggggttattctctatggcaaatgtcggggtaggggtcctccagttgtgaatcttcagtctcaactgcccattccccaaagtgatcccggcctgtctatccatccaattctctgacatgggctcactttgggaaatgggcatgtcgaggtgttcaaaaggctctctttagcctcgagtggttctcgaggttgttaaggaaggtacctcgctgcaggatacgtcagtcaaatgcaaggtgggtaatccgtctttgcaagatcggtcttcgagatcgtgaggagatgtgatgacgcctccaatatagattacttaccaagatgtgtccttgggatactggaaagctgtaagtctgatgtcacaggaaatattgtggaagctatcctgaatcatcagccaaggtccttgggcgttggtgaagctccaacgcgtgaaactgcgcgagaaattactttgtgagttttcaaagcgttgatagcatgcactatgaggtgaaatgagcttttgttctctgatacaatggtgttgatccctcaaagagatggggagggatatgcacgaaccaaagctattgagtttgcggggtgggaagggttgaagggaagaatctcgggaagggaacaggatggagagaaagaaagacaccaaaaaaggataggctctgaaatttgacaaagcaaaaaatggtccaccttcgagcttcgacaacaatcaacaatggatacaaataagctgtgcacgtgctactgccactgagccttcgaccggtaattgacactgaccaggcgattgggacagaaatgaggacacacacatgtaactcatcccacacagttcaaggcatttgagcataagttcgaagctcttcgatggtgtcttcaaaaggctccgattgctacttatgctgtgggttcagagcctcaaattgaatctgctccagaacagaaaattatgtcgatttcctacccaaaagaatcaatacgcaatacgaagtattgtattgagcaaacatcccgataccacctatgagacttccttgtgatgccagcgttatgttccttccgcaccattcaaactatcagcgatagatagcctacgggagcaacttctggtcgaaactcagctacactaaaacgaggtcaaagaactgacatggaggctcggaggaggcttcacgacacgaaacaagcatgatgcccttcagttggtcttgctgactatgggtctccaacaagagcagcttctgctcaacacctgccttacaccagaaacaaaaaaaaaccgacatggagggttcaagacgccaagcagccatgtcctcgacctgagcttttgctcgacacccaactaaaacaaaaacgatgtcgaaaaactgacatgaaggctcggaggaagattcggggagcaaaacaagcatttccttgaactacttttatcatctcttagctataggtttagggggatagtttcatatctgaggcgaatggtgcttattgtcaatcttccttacgtagaagtcacggaaacacacctgaagcatactccttgagaagagattgaaaaatataccacggaaggctagtagagtaatcaaagattattgttgtattatacataaacaaaacccaagaggtcaaatgggagctcaccttgttgcgtttgcaagtcgttagggtgcgagtctgtcacgtgtggtcacgtttcttaccgactcagtgaataataacacgtgacgcttctcttcagcgaccacaagtcaaataagcatcgaggacctatttcacacactgtaccttttggtggactggctaaataacccattattacgatggaacatattgcaatatgattacttatcgttcgattaccaaaagttgtatacatggaatttatgctctgcacttgagtgggcgagtctatgcatcgattcacaccaagtcaccgagttgagcggcaacagccatagcagaaacaaacccccatagaaatgccaacaacatacgtctcatctacctacatgacacaggataaaaatatccgtacggggtacagacatgatgttagatcaaccagccctcgctgtccggctattggctctcagtcgtgggcggctaagcgcccatggaggctatatttggctgcttgtccactccggcgctttcgacactcacagtagccagtgagatgctttgatacttcatgaaacaaaccgttgcacagaccccttgtcttcaggctttatttttatattttctttgtttcgagatggttatggttcactctgattggggctgtctcgactatacggggttgccaaggtccatgaagctgcttctttatgagcaacattgggctaatgtgatgtctgctgccgcccgggatgctgaccatttccaggtgacgttcgtcgcctgctatatttgaagattcattgtcccttgttttattctggttctattgttctcagtccacccggtctattcatctattgatgccccctttcattcaacgtctataagaaatcatatataccatgtccttccactagctcgactttttcctctgctctctttatcatcctttgagaaatctccattttgatgcaggctttgcatatttccttgatccaactacacctccaaacattcctggtcctcgctggacgatatcacgcctgaaacatttgacaaatataaaaaaagaatccttacaatggtattcactcgaaccggtcggtcggtctttccactgctcccgccttatggagctcacgattcaagcacggggcggataattcccctacatccagatggcctcactccctatctcggtctgcaagctcggctttcacaagtatggatcaatcgatggacaatacttctactgcttgttctcttccgagtgttgattgcagttggcgacttgcagtccaacatggcatccgccaagcgtgaggcgctctctgcatgcacgtcagtggagtctatgggtagcgcgatggcgtcaatgccatactatctatccaagggtaccaacgagcttgtggcttcctcggttgatgaggctgtttccgccctgaagtccgtgttgttgttgactatcacgggcgtcggagagattctatggttcgtcatcaatatgatgtactctacctacgcctgtctcattacgatggccgtccgtggcacggtaggagccggcattgaattgatcaaggaagctactgagtggatcaacaaaaccctcacgacaatcagtggtgacattgagagtaccgtcgacaaatacaaggacgaactcaactcatttctcgagacaatcaataaagttgccagcgtattctcggacgatcctagtccaatcgacctcaacagctcaatcactacgctggagaatctgtctcttccgtcgtcagtcaaccggacggtcgaaaaattagacagccttgtccttcccaacttcaaagagatccagaattacaccaagactctcttcgaaacgccctttcaagaagtcaaaaatttggtaaatgaaactttgggcacttacagttttgatcggtccgctctcccgatccctgccaaaaaacagttgaccttctgcaacgacaacaaaggaataaatgatttcttcaacggagtcactgcgctggcactaaaggcacgccaaatattcattattgttctcgtcattgctgccatattggtgtgcgttccgatcgcgtggcaagaaatccgccgatggcgctcaatgaaagaacgctcccagttggttcgcagggaagcccacgatccaatggacgttgtctatattgtctcacggccatataccgcctctgcaggcatcaaggcagcaagtcacttcagcaacagccggcggcagatcctcgtgcgatgggccattgcctatgcaacatccatgcctgctcttttcgtactggctcttgcattggcagcactattttcttgtctgtgccaatacctgctcctgcattcggtgaagaaaatcgttcccgcactgagtgccgaggtaggagaattcgcagacaaagtcgtggacgcactggaaagcgcctcaacagattgggctaccgatgcaaacaaggccatcgttaatcttgacaccgacctcaaccacaacgtcttcggttgggtgaacagcagcacgcaagccataaacgggactctcaacttcttcatctacaacacatccagcgttctaaacgagaccttcaaaggcacccttctgcaagagcccgtctacgagctatacgagtgcctcatcggcctcaaagcagaggccctccaaaagggtctaaactgggtagccgagcacgcacacatcacccttcccactctcccgaatgatacattctctgccggtgccgcctccagcataaacgacacctccaatccctccgatagcttcctcgccgatgcaggcgatcaaaccgctaacaaaatcaccgaggtcgtcactagcgtgatcaacaaactggaagcaggcctgcgaatcgaagccatcatcgccaccatcattctcttgctttgggtgttcatcgccttgattggtataactcgcgctatgatgcttttctggacgcgcgacaaacaccgcggcgagggaggcaagggtcatatcctagattctgtgcctagaggcggaccaccaccccatgatgcgaatgggtttgctgaagttccactcacggctattccgaggaatatgtctgcagatgggcatgttgctccccagtatacggcggcggcaccccccgtgcccgtgcggagtgagccgtcgtcatatggtaatgagaaggttggttttgcaggggaaagggcgttgcagttggactcgggtcctgatctgaggggaagtagctatgttgaatatgatgtgaagcgatgatgggaaatatattcccgtcttcttccatcttttttttttttgatcttcgctattctcgagaggactatgctctttgtcctccccctctctctttgtgtcatctctggcatttcattggacttgccttggtcatttgtttccatatgtggggtgttttctgtcataataattctcagtagaatatttgaaatcaagaatgccacttgatttcaaaaatatgcaagtcgtgttgaacatcatcttaaatcatatctcttctcacatctcatacaaaacaccttacgagatcggaattcataaacaaagatagaaaaaatatcaatgtactcgtctgtctggatatgctaaacaaaaacccgagaaaggcataatctcatacaaatcgttacaaatgcacaaccactatatggcaacaaagaaactcttttccccctccttaggatgcactctcacgcgctcgatgatcggatccgcacaactaacccgaatccgctcgggggtggcaggggactccaaagagagcacgtcagtgacgttccactgcttacgcgccgccttcaaagcgtcacgaatagcaaagaagaccgcactacccataaacaagggcggctcgccgacaccccgcgagcgttgaatcgtgcgcaagttctcccactccacatccttaagcaaactgacattgaagacctgcgggatatcacggaagccggggatcttgtagtttcccgggcctctggtgaatatctggcccgaggctcggtgccagagactctcttcggtggtgaagagaccttgtccttggacataggcgccttcgatctggccgtagtccactgaggggttgatgctgcgacctacgtccatctttatgtcggagcgtagaggcgtccagtcaccggtcagtgtgtcgatttggacttcggatgccgtgactccttgcgtgaagtagaagaacatctggccgctgttctcgccccatacgtagccgatatccggggtgcggtagtagccttgtgcggagaggttgacacggtcgaagtaggctgcgtgggctagttctttcatggtggcgttgggcatcttctcgcggaagggacgtaggcgtttgtttaattcttcacaggcattgaaaatcgcgtagccgttgagatcggagcttgccgaggcggccgttgaggaggcattggccactgtgttggtcgctgtctccgaaatgaagacattcgactgcggcacttgcagtgcttcggcggcaatcatggtcatctttgtgtgaaggccttgtcccatttcaacaccaccgtgtgctacgaggacactgccgtcgtggtagatgtgaaccaaagctcctgcttggttcaagaagagagctgtgaaagaaataccgaacttggttggcacaatcgccattccgcgtttggaccacttgtgctgtgcgttgtattcctcgacagccttccgacgctccttgtaagagctctcctctagcacttgcttgtacatcaaaggcacgtgccaatctttgaggggctggttgaaatgcgtcatctcacctgccttgtacatattgatggcccgaatctcttcggccggaatatccagacgatctgcaatctccgatatataacactcggcaaagaacaagccttgtggaccgccgaaaccacggaaagctgtgtttgatactgtattggttttgcagacccagccgcgcacattgacattcggtattttataaacgttatcaatgtgtgataagcttcgctccacgacagcaccggatagatcttgcgtatgaccgccattggcgtatacatctgcatcaagagcaaggagttttccttctttcgtcacaccaaccttccaatggcagaggaacgggtgccgctgaccagaagtcaaaatatcttcatcacggttgagcatacatcgcacgggccgtcttgttttcgcagcgccaatggcacaaataccagccagctggatagatcgagactccttgcctccaaagccaccaccaagtcgcttcacgcgcgatacaactttgttcgcagatactcctgtcacctgagcgacataggcttgtctgtacacgcttagcttaaattctgttataagacagagtcaaatatatcgctactcacgtttcgttgggattctgggtaccactccaaatctccatttcaccatcctccggctttggaatcgccacacatgcttgggtttccaggtagaagtgctcctggccacccattcgcgagactccagtaaagacgtggtcagcttttctgaacgcttcctcggtatcaccatttttgatcgagcgatagtggtcaaagaaagacttcgcctcaatggcctcctccatcgtaaggatactcgggaggtcttcatattcgaccttgacagccctcataccttcctcggcgattttggcactggtcgctagaatggcaccaatcggttgaccagcagtaaaaacttcatcgacggcaaagaaaagctcatcggacttgggttgtccccaccaatttgctttgggattcggaagatccgtgtggttaatgtagtctgcaacacctggaatgtccaatgcagcggatgggtcaacgctaaggattttggcatgaggcttggtggacagaaccatgcacgcgaataactcattctgttgcacaggaatgtcatctgtgtattgagcctctccggtggactgcttcaacgccgcaacatgcggagtcgctcgtccaagaatcttctgttggtaggcgacagagctttcaagatctttagctcctgtagaaattgctctttcaatctcagcaacaacatctggatctaaatccgaagccttgacatcgagttctgaaagtacgtcgtagtaaaatctgtagaagaatcccagagccaaagacttccgataactagccataccaccaggaactccaaatggcaggttgaaatcctgctccagtgcgctcatgacaccctctagagttgcggggttcgtgaacttcttgccaaccaaaaacgcctcggcattctttgctgagacggtcatagctgccatgccaccaaacacaagattggcgctgaccacatcattggtcttagaaagagtcacgcgtaaggcggagttgacaatggcaatatcatcgtccttccgcttagattgcttgtaggctcgaatgtgctctccctgagccttcgcggctggaatgcgcaagctagcaatgatcgcgttgggagcgagggcagtctttctgtatccttggaagaattcggtcattggaatttcagtctctccttcgagggattgggccacgaggatagtgttagtggctaccaaaaccggattaagatcagagatgggcgatgcagtggccaggttacccgccggggaagcgacgtttcggatctgtcgcccagcgaaatagagcaactgcttcttgattgctttgaaaggttggcctctgatatcgccgtacttttctaccgcttggtcacagatgtgttcgaggtctgttaaagacacatttgcgccgatctccagatagttgtcatgcaaggtatattgtcgcaattcggggatatctcccaggtagacggaggccgcgtatcgcattgccttgaacttaacctcaatctgtgtctccgtgcttccgccaattagtttagcatctgggtggacgctcttgatcagcaacaattgctcgacggtcaccggtcggtaccacttcttcttcttgttgccatatgccaagggtcggtattcgtgtttccgcagggcgacagggaagatcaactctgtgtctggactgtacggcttgaattctggcgcagggaacttgtaatcgacagtctcaatctcgccattcttggtggaccctttgcagcagccaccggatccatttttctccatacagcagcccgaaccaccattcgcagaggcttttccgcagttgttggtcgagttgaagctctgggcagcatccagaataggtctgtaacccgtgcagcggcaaaggtttccatcgaaggcttcttcaacatcgtgttccgagggagatgaattgtttcgtagcaaagcataaagagacttgaaattattagtcaacctcggatcccttcaaaaatggaagccagcgaaaggagcataaaggcgtaccatgactattccaggagtacagaaaccacattgacttccattgccgaccgcaatccgctgctggatggcgtggggatctttcacattcccaatcccttcgactgtgataacgtgcttaccatcaatgctaacgagtggagcgatacaggcattcacggaggcatggtagattttcttcgttgtcggattgatatgggagacgacctattgacggtataacgctctagttagcactatgtatatgcataacccgatatagttgactgaaacccaccacagtgcaagcaccacagcctccctcggcacatccgagcttcgtgcctgtcaacccaataccccgcaagtattcgagtagagtcacttccgggtttatcgtgtctagtgcaaccttggtgccgttgagatagaacctaatagtgtcatcccagtcctcagtcaacgcagacaggctgatgggcttctcgactgcgcccgtggactccgtctccaggattcccggcgccatagtggaaatgtggggtaccgataagtagagataagctttcaagggcgacttgagatgcgcatcttttagaacgagttggcttcgacgtggatatattagtgaagtctcgagatgtcagtattgtaggaggaaaggtctagatgaaatcagatctccaaaactcggtaatcaaaggtctttaggtccaaggtttccaaggtcgttatctatgcggggatcgccactgtccgagcagtcggatgaccatcggattgcgcgttggaccaatagtttggctggaattactagttgctaccaacagtatgtacagagcacatatttcacataagctgcatgtagacagctagtcagaaatagaatagacagggccttgggattaaatggttgggaacaggcagcgggagagctttcccatctcttccacctttgaccttttctatcgcgcccatggatgcccagtcttcggtaaagctcttatcatacacagtggatgatttggctaactcacacaacatagatgatctaatttggcgacaaatgtatcgccgtgacgaacgatacgctgctaaacaagattcgtccgaccgtacaccgcttagaactcgcggagccccgttttggacttccagaaagagtcattgtcaagcaacagaaagacgaacgggaagctgagttctgcagtgagatatcttcctatactaagttgcagaagcttcaagggactgtcctcccagttctattttggcgaaggctctttcaataggcgtcaggccttgatcctttcagagattgaaggcattactctgcgcgagctcgcgaaacaagtcgaatcaaatatcgaagaggagactttggagttatctcttgagaatgctttcggggagtcttacaagctcggagctgagcattatgacctgaacctaggtaattttctgttctgtgccaatggacaagtggtggttatcgatcttggagatatcgaatttcatgatagacagcaagcttgggaactcagcctcagtatgggctgtgcgtactatctgatgagcagattcagagatgtgagatatccacgtcgtcctccatcacctgttttgtactcagaaatgcctgttgccttgggttgcacggggcctatgagctgctgtgggagccttaggaaatcgaggtttgaacaatagcctgcaacaatcccatatcatcggctgattctctcaatattcgcgactattccgaatgggtcgcttgacgtggagggctggctggggcagtaggcaaaaagtggcaaggcatgagcactaaaaacttcatacgtactccgtaggtaaggcttgaatatctgtccagttaaatttctatatttgaattacgccaaccaaaaaaaaaaagaagctacaatacatatatgaaagaaatggttcgtagatggtatccccataaatgcgcgctcacggtctcgagccagcaaaaggtttctcttcatcttcccacttctgccgttcaacgacgcttcgagccctgtagaatgcgggattagcaacagcctgtgagacattagatacaaggcaacgacttaccgataggccttaacaaaacgccaaacctctgtgtctgcaaggttccaagcctcgacaacatctttgatattgatgccggtcgtttccttattcttaattatctcgcgggccttttggatgagttcatattctttgccgactccttgctcgcttggcgtgttatcctgcgcactcttggtagactctatgtcgttctcagtggccggatcaatcttacccccacgagggatcttgaagccaaactgccattcaaactcgtccaagagctctgccggaagactctggcctgcctctgcaggaagagattccactgtcatccacaacgaagttccgacagcatcttcgcctgcgacaacctgcttgaagatcactccccggtatgaagagcccaattcgggcccaaggtgttccttggtcacctcagagagccatgcgtcgcgctcggtctcccggcgaacttgtgctgtagtgatctgctctgagttcctctgaaggctgataagagtgtagggatgaggaagggtgccgatggtgaacaagaaggtggtgtttttataggtcgaaggctggctgatacgcatgggttgctttgcagtcccagacccgcatgggcggcattcggggtcattgggtggacaggagtcgggaatgggcgactccgggcactgaataagggcctttgccagcctaagagcaggctccaccagggcagtagtgtgttgagggaacggcttcagcacagccagtccggcggggaaggagctatggaatttattatggaggtgggcgttgatcagttggacaagagccaactgaccactcgcagcgttctcggtcatcttttcgtgcacggcagagtagccagaggtaatggctgcagatttgtagaacgccaaagcggtcggcggttcaaccttgaacgattccggatcaatcagatcaacgaaggactgggttttatcatcgagcttcaggactgcgctttgaacggctgcatcgatctgcgacttttcagccgcgtaaaggccattcttaaggttttcaaatcgggtaatggactctgggatactcccccgccgaagatacgacagcatgaaatcatcataacgcgccatggggaagcagtggaaatccgcgagcaagcccgtgcccatgtgcccccacgcaagccaggcgaacacctcgttctgagttttgggcgcgagtttccacttctggacaatttcgtaattcgggttcttcattgcatcgcccggagtcaacaccacaggcttgaatccttgcgcgaaccatgcccgacgccacgcgaggagcaattccgcatcggcgctctgcaattccttgagatccttgccattggctttgttggggttatatttcgcatcgtagtatgtgtagatcggtcgacgttcgcggaggggagggaggacggagcgagtctcatccaacgtgatggcagaggagaatgggttcaaccattctagggtgctgtaccatttcgactcgccgtgtgtgctgttgttctgttcttcgggctgctcgtgggagggagggcggaacgagggtaggtggaagttgcttaatgagggtagctttggtgtgggcacgaacttggccgggcctgtggctggttgctcgccgggatcagggatcggagatgacgagaaaatgaagagtaaaagcgcgacgaacacaattacagacaggagggctgtactcctgtgaggaatcatctttctagcattcaaaccagaggacctgtgtagaggcccgtcaaaagttgagaaaacacgtgtgtctttaaactgcgacacttctcctgaaactccacccggatttggccaattcagtcttggcgaaagaatgacgataggtatgaagagaactcagcacaacttctatctgaatctcttgctcagaatagaatccactggcttctaatgatgagccaaatgcaaaatagaacctttgataacaattttaggagctaggacggggatggtagttccttactttgagatcaaaaagaaatgatgactcagcgagcctattataaatgacctcatagaatgagacctgtgaacctctacgacatagaaactcttaacaaccagatttatgctcaaaatattccggtatctctcttaggatgatcaagatactttacaattatgttcctgatcatattatattgtgttcgtttacaagcaactagtaggaacatatttatgtcgctgtatgtagctttgatctaaacccgtacagctagtgatgtgaaggctttgcaaagtgagatatacatcaaggatattccaccaagttatccacacatatcttgggctggcatatgttatgttgtatgttgtacattcgtcttctgtctatatgccctcttcaccagaatgagacctctgcgatagttaaatgtctactcttagcaccccaagaatggctgtatagagcaaaatagtctcaacgttgtcaatgtgagtatccaatggaggaatcagacaaagggaatgagtatacgtagatctcctgtactcctccagttctgccaatctgtgccgctcttggctggaaaaaccttaactccgacgccaccccgctgtccaatcttggcaggcggtgaaccctctgtggggaaaacagctgatcagcgcctcaattctcattggcagaaatagcggcgagatcggacttttccgctcgttatgggggggtaattttaatattgagtcaccgtatcttccattctccaactcttttgaatatactgcaatcatggctgtgggaacagcctctttgcaggaccgcctggagatatgggcacaaaggttgaacaatctgactgtttccccattgacccgagattatcccgatacaaaagagaccgacggcaagagagtcattgaagcttttgagtctctgcgattccccaaggagaagcttgaggcgtcgtcatccggattcaccgctttcttaactgccttcattatactggtagcgcgattgactggtgatgaggacatcgctgtgggcacaaactccaacgaggatggccgtgccttcgtcatccgagttcccattgatgcctcggagtcatttgcccagctatataccaaagtagacaaggttcgtatatattttacttgttataggattcactactaaaagccttgcaggcctttaaggaggggtcttcccaaatcgtgcccttggtcagccttcgctcgtatatacaggagaagtccaagtccgaacgcaccccggtcctctttcgattcgccgcgtatgatgcccctgctgcctcccaggattaccctgcaaacaccttcgataccactgatttggtggttaacgttgcaccgggttcgaccgaggtcgaattgggcgcatactacaatcagcgtctcttctcgagtgcccgtattgctttcattttgaagcaactagccagtatcgttcgcaatgctgcttccaagccggacgaggctatcggacgtatcgacttgatgaccgaagatcagcgcgccctcttgcccgacccaacatccaacttgaactggtctaagttccgtggtgccatccacgacattttcactgccaatgcggaaagccacccagacaagctgtgtgtggttgaaaccccgtcaaccagctcccctcaccgccagttcacctatcgccaaatcaacgaggcctccaacatcctcggccatcatttagtacggtctggcattcaacggggagaggttgtcatggtttatgcctaccgtggcgtggacttggtggttgctgtcatgggaattctgaaagccggtgcgactttctccgttattgaccctgcctatcccccagaacgtcagaacatctaccttgatgttgcccgtcctcgcgctttggtgaacattgccaaggctacaaaagatgcaggtgaactttcggacatcgtgcgtactttcatcgacgaaaatcttgaactccgcactgaaattcccgcacttgctctactcgatgatggaaccctcgccggtggatccgtcaatggtcaggatgtattcgccaacgatgtggcactgaagtccaagcctactggtgtcatcgtcggccctgactctattccgaccctgtctttcacgtccggctcggaaggccggccgaagggtgtccgtggccgacacttctctctggcctattatttcccttggatgtctgagactttcaagctcaccccagacgataaatttactatgctgagtggtatcgctcacgatcctatccagagagacattttcaccccgttgttcttgggtgctcaacttttggtgcccgctcgtgaggacatccaaaacgaaaagcttgctgaatggatgcagaagtacggtgccaccatcactcaccttacacctgccatgggtcaaattcttgtcggtggtgcctctgctcaattccctgctcttcaccacgcattcttcgtgggtgacattttgattaagcgagactgccgctcactccagggacttgcgcccaatgtcagcattgtgaacatgtacggaacaaccgagacccagcgcgctgtcagctactttgaaatccctagctacgccagccacgagggctacctcaacaatatgaaggatgtgattatggctggtcgcggaatgttggatgtgcagatgctggttgtcaaccgctatgaccccactcgtctgtgtgctgttggagaggtcggtgagatctacgttcgcgcggcgggtcttgcagagggttaccttggttcccctgaattgagtgcgaagaagttccttaccaactggtttgttcagcctgaagtctggacagagaaagaccaagccgaatctaagaacgagccctggcggcaattctacgtaggtcctcgtgatcgcctttatcgcagtggtgatctaggccgttacacgccatctggagatgttgagtgctctggccgcgccgacgaccaagtgaagattcgtggtttccgtattgagctcggagagatcgacacccatctttcccagcaccctctggtccgtgagaacgtgactttggtgcgaagagataaagacgaggaacccacgttggtcagctactttgtacctgatatgaacaagtgggcatcatggttggagagcaagggccttaaggacgatgactctgactctgagggtatggttggtctgctgcgacgcttccgtcctctccgcgatgatgctcgtgagcatctgcgcagtaagctccctacatacgcagtgccgaccgttatcattccccttaagcgcatgcctctgaacccgaacggcaaggtcgataagcccgcacttccattcccagacactgcagagttaagcgccgctgcacctcgccgccgctcatccgcggtgcaggccctctctgaaaccgagcgaactctggctgaagtctgggccaagctcattcccaatgtgacatctcgcatgattggaccggatgactccttctttgatctcggtggccacagtatcctcgcgcagcaaatgttctttgagcttcgtcgtaagtggcgtgttattgacatcagtatgaatgctatcttccgcagcccaacccttaagggctttgctggcgagattgaccgcctgctggcaatggaatcattcgcgacgagcgatgagaagactctagctgtggaagctactaataagccggacgacgagtactcgaaggatgctgtccagcttgtcagtgaactgcctaagacattccctcaacgtaccgagtctatgctcactagtgaacccacggtgttccttactggagccactggtttcctcggcgcgcatatcctccgagacctacttacccgtaagtctccttccaccaaggtggtagctctagttcgggcaaagaccgaggagcaggcacttgagcgacttcgctccacttgccgcgcgtatggtttctgggatgaagcatggacctccaggctgcaagctgtctgtggtgatcttggaaagccgcaattcggtctttcccagtcagtgtgggacgaccttaccaaccgcgtcgatgctgtgattcacaacggagctcttgtccactgggtctacccctatgcgacacttcgaccggctaatgttcttggtaccattgatgccctcaagctgtgcgccagtggaaaggctaagcagtttgcctttgtcagttcgaccagtgctttggataaggactactacgtccaagaatccgaacgtatcattgccgctggtggaaatggtatcagcgaggatgacgatatggagggcagcagagttggccttggaaccggttatggtcaaagcaaatgggccggagaataccttgtcaaagaggccggccgcagaggcctacggggaaccattgtccgctctggatatgttcttggtgattcggtcaccggaactaccaacaccgatgatttcctcatccgtatgctcaagggctgcattcagattggccttcgccccaatatcttcaacaccgtgaacatggtgcccgttgatcatgtggctcgtattgtcattgccactgccttccacccgcccgccacgggcgttaacgtcgctcatgttactggacaccctcgtctgcgctttaaccagttcctcggtgcgctagagctctacggatacaatgtcccccaggttgactacgtgccttggtccacttccctcgaggagtatgtcaacgatggcgagcacaatgacaaggagtctcagcatgctctgtaagttacactcctatcggtccgttactgaatacaaactaaccttctttagtatgcccctttaccacttcgttacctccgaccttccctccaacaccaaggctccggaattagacgacgtaaatgcagccacagctctgcgtgcagatgccacctggtcgggcgttgatgcgtcagccggtgctggcgtgactgaggaattagtcggcttgtatgcctcttatctcgttcaaaccggtttcctgcctgcaccgaccgtctccggcgcccgccctctgcctgcagcgcagattagcgaggaacagaagaagaccctgttgagcgttggtggccggggtggtacatcttgaaatttataaaaagaagcacatgtacttatgtattctgattttaaaaagcatttacatttctcatattctttaccacccaccctcgtattcaaatgagcgattaaatgtgtggcttgtagagtacatatacaccggattttaggccgcgtaagttgggtttctgtttccgctttagtgctcatcccttgccgctttttgctcactgagcaccctgatcatcatataggccggatgaacggggtcccgaggtcccgaggtcgcccgctcactacggagtactgaggagccctaatcccactcattcactgagcgtgatctgatcgctctgacttactcactgagcacgactggattattgaagcggagggaatctacagtcgaaatgttccgaaagccccccaaaaaatagactatacactaaatccgttaaataaaaggctatcataaaagtttactatcttcacgtctcacacatttacgcactctgcatgtatatgtactataaacatatccaaaatagattcgagttagggccttcaaatcaatacacatgattgatcaatggcttaacacctaatctagtaggactggtgcagggagatcggaagactgtctgcgcgcaatcgaatgttcttctgtttatttgcccagacgcccttgcttagatcgagtctgccctcgtatggaacataatgtggagtttctttccttctgttaatggactcgtactagcactgtggcaactaagcggttctaggcagaccatgaaagcgctgggatcaaggatatatatgatcatgatttcccaccagcgagtcctatctcctcatacctcgtcagtcgatcgagaatacggataaaaccaaacctatattatcatccatcacgtcatcgatcaatccaacaagagaccatgaggaatcccacctgtccccaagatatcaagcccacccgcaccgccgacttccacgagattttggccgtggcaaagctgtacaccgacgcagtccggaccagcaaccctgaatgcattcacaaatccttccataaggatgccactatgtgcgggcacataggtcctgactttgccaatggaccagtcacagaccttttggaaataatgaaggagaagggtccagaacctagtttgatctcccacctgcatatcctgtcgacaacccctaccaccgccattgttgaagtagatgcagaggtggatacagttgggtttagagatcatttatgcatggccaaggtggacggacgctggcaagtcatgaccaagctttaccacttatatgagaagaagcgtgcttgagcgctggctttcttttgttcgagtgaccgatggattggaggtagtgcttgaatgtccgttatatgataggataccatcaatctatgtccattagaaatagcagccagaagttttgctcggtagattcatgattttgatgcagtatttcgtccaaatttatccctctataagcattactagcttattgctatccactccctgatccatcggatattttttgacctccaaagataattttcgctgacataaagtgcggaagtaaagcaagggggatcatcaccgtcaagagacggaaaaattatcctaggcgccgatattttatgcgagatgacccgtcccggcccgactctgtggttttgggtgagagatgtctttttccctgcgggtatgtctcccttgcatattgcatgtcatacactatatgcagtacaatgtagacaaatgtatgttatacgtatttcggagattctactggactgtggaccggtcaccctataacacatctcataaattcgatcattggggaaaaagcaagctttgtgttcagcgtgctgtatctaccacgtagaaagactatggcatgctggccccgacattgatattggcgccatacacagggcttgaatcctcgctgagcaaccagactatcgtccgagccacatcgcccgctttaaccaccgaaaatccttctttcctatagacctctttgacctcatcgctcgttttagccttgggtataaactgtggcagcaacggagtgtcggttatccctgtgaacaacttcttgttagccccatctagccgttctgtcatggaacaataagagctgtacctggagatacgctgttcacgcgaatcccgaatggaaatgtatctgctgccacgcatgttgtaaagtaggtggaagctcccttggaagttccgtatgcatacacatctgggatatggctcagtgctgcaatactacccacgttgacgatgctgcggtcatcagagggaagcgatttcatagcgcgaacctccgcacgggtgcagtagaaaacaccatcaagatttactttgagtaccttgctccattcctcatctccctcctccagaattgtaggcgagtttcggagcccagcaccctgggcaatgccggcaatgtttgcggccccgtgaaggttaccaaacttggccacgatactcttcacccatttttcaacctcagtgggcgaagtcacatctaacaaactgcagtgcacctctgtggctgggttgattttcttcatagattccttcagctcgtcaaagttcttgcaggatatatcgcccacacaaacagcagtagcaccgcgctcagctagcagtctgctagtggctgcgccgatgccagatgcaccaccagtgatggcaaataccctggatttcacggatgccattgggtcaggttgatttattttgatatgagcaatgatattcaaagtgaaagagaaagggttggagaatattctgagcgaggtattcgtgcccagaaacaaatgtctcccttcttcaatcataatgtagttacttctgaatcgtcatcccctccattgtgtacataaaattctgatctactggccgccagggccgtaagggacttgatttacattctggaaggataaaggatttcctatgtcgcatttctacgcaaggatagccacgctgggtagcattgcatagctagcttataaaaatgaagcgatagattttccgcaacaatatatcgtgcagtaaatggctggctgaacagtacaccgtaatttcctgatcctgaaagagcataccatgacacgatgcatcactcataaacacctcgtgaccttatagaggatgaaatatatagtttaggatgatattttgcatctgcattgcaacgtaagaaaactaaaattcagactattgattagcggagtaaaagcccatgcaacgctcttttcttgtgtgcctcatttaacttcaaattcaagccttgaactagatctgaaaactcatgtggcttatgcacatcggacgtctggaaccattcttctccgtgaagccggtctgggccatcagtaatctgaaagtggttctatcccgcttgtgatacagcttctacggcacttaggatctgtcagtaccaattaattagagatatacaggaatgaaaatagaaggactgtttaataactaatatcttaagattcctcaagaacaagatatcaaagctaacaggctggctacacccatttttgcttctcgtgctctgcaaaggtcctgaaaaaccttggtgggttccccgtcacttcttcgacagaaccgttgagagtttcctggggactatttttgacatcaacttccatcgcagcagacatagctgcaaaatctgcaggcattccaatttcgtcaaccagaatattggtatattctgcttccgacaaactgcgatgggtgattttcttgccgaggatcgaggtgagaatctccgcaacctaggatgtgaatcaagtcagttttgttcgtcaacaagaagtaggatataatcatcttacctgcccgtatgagaggagctctgggccttgaatgatgtattctgtcttatgcgagccccattctgtcaagcaatggaaagcaacggaggcaatgtcatcggctgagatgaaggggatcttgccctctcctgtcgctgatactacttgactctcgttcttgatccatgtccgttgggggtcttccaatagattctctgggaaacaaaaaacagtttagccactctatagtcctaagctatatgttagacaggatgaatcatacccatgaaccacgtcggcctcagtgccacatactcaactcctggtagagagtctagataggcgtggacctgacccatcgagtgatcgcctttctcaatattactggcactgacaagcacaaatcgctggactcccttagagcaagcaagatcaacgaattggatcataggtgggaccatgtccatggtagggggtccaaccagataaacggctgagatcggttgcaatccatgtttaccaatctctgcaaatgggttgtcccacgttgtcttttcataccagttgaaatgggaagagttgtatgggctttcctgtgaagtcgagctagatccaaccaggaatggagtttttgcagcatcaagaagagccgcaagacgactggccgttttaccccgtcccccaagtacaagaatagtcattgcaaaaggtctagatagtaaggcagtcggaaagttgtcttttgtatagctttcccttctggagaataattgagttggttacgagatattcagacaataagtactcagttgatagctcatattgaaccgtaaagcaacatgtgactaaaaatatgccggtctcacctcatgcttgactatgacgaattcaagtgcagatactatttttccttgtttgaacctgccaggctaatggctaaatgaggtctgcagctcccaggatcttccacaagtacacaaaatacggctccgccaattgaccgccattgaatatcaacatctcatgtatcggttgagctatgtataactagataacggaaagtataccaatcaggcggctatgacggaaacatgcacaatgcaagttagaactgatccttgctgagtcccatttgcgaagacttcctcgtgcagcgccaatacatcctgcattccaatttgagctcatgaagtcgcggtgggctagacgccacattttcggaaagtgatgcaacttttcatagtcgtggcaagctccaacccccttgcatattgaatatgtcgacacatcccatatgttgtagtcaacttggcagctcacgacaccaagcacaaaattcgctacacccaagagacatgtagtaaagaaatacgcgaacttcgaattccatacatttagggaaccccccggttttcaggtgtaccttcctaatcgggtacgtaccctgcttctgcctgccgcacataataccgccttccaatttaacataccacttttgtggcagaacagtaggtacctgtaatttgtatgtaaactgctaacagaactaagtcacttttgtcatattaactaatttattgtcgactgcatcatcgttaatggattaaaccctataggaattaggtagaatatacgtttatttctgatcaaaatgcatgttttttttactatgtataccagaagtgggcagaatatactctctacactggcagaaaatatggcagtattcttgatcgtaccgtattcggaaggcggtactgaaaattcaagggagcggtatcagctagatgttgctattcgaggcatgacggtatacctaggtataacgcgacctggaggattctgctacctatgtcaaattgtccgtgcaaaactccgcaacacaccatcaaagtctcgcttggacatttttctcctgacctatttcagccccctcaacgccctcttgcacccgcgtggccaattcggatgaaaccagagcgaaagtgcgatacaccttgtttcggatatcctgacgggtctgcgagactgattcgacaattctctccaccattcgatcctggaactcctgactccggaactcgggaagtatttcataatactcccgagcgaatttgtaatcatcctcatgaggttgagaccatacgtccgaagagacctgcgcaacccactcagcgaagtctttcccgaggctggcttgatactcagcggttgatgaggtccggggagatgcctgcttcgacaatgtcctccccaggcggtatcgctgtgcgtcagggtatgcgaagaggcgggcctgcaggatcggatcctcggaggcctctataccaggaacaagatgagaaggtgagaacgctagctgctcaacctcactgaagtagtctttcacgttgcgattcaaggtgagcttgccaaaaggccgggaagggattttctcaacaccctggggatatgttcccaggttccagtgcttggtgacgtcaagaatattgaagccaagatgaggcgcgtctttgggatcaataacctgaacattcgccgtccaagatggatgatcgcctcgctcgatggcctcaaagaggtccctggacgcaaagtcgggctcgctggaatccatgatggtgccagcaccatccttgaagttgggtccgcgatccgaagacaggaagaaatggacatatttgaatgagccatcgggcataacccatttgaaggcgtgtcctgagtagctgctcagagtgcgccaagtaaacatacgtccgaaatcactgtattgcagcaataccatatgaattgattcatgattctcggtcacgaattcccagaaattgttcgggttgaggcggttggtctgggggtctctccgttgcgagtgtatcatgtcggggaacttgacaggatcgcggatgaaaaagaaaggaaaattgaggaagacccagtcccattccccatcgctggtaaacaacttggtcgccatgcccttcaggtcctgaacgccctcggaggagccgcgctccagaccagtggttgaaaagcgtgttactaaggacgtctttttgccgacaccgaggagcatgtcgatattacaaatatcggagatgtcgtgggtcaccttgtcacagaattaacttctaattccaattcaggattcgaatgcgatttagatagtacctacctcgaactccccgtacgccccagctccaagggcatgaaccacccgctcagggatcttttcgcggttgaaattggacaatacttctagagtatggacatcttgagggccgatgctagaatggccggacgagggtgctttgcccatgactgggcatttcttcgcgtagttgggagccatttttttgctcaatgtattggatgaaagacttcagagtgaactgtgtcgttgagaactcggctttctccgggctaaatactactaaaatccagtatgcagaggtgtaagcccgcagagactaccttttctgagtatcgggtatttcctttctatctctctcttgttgtctgcgaaccctgcattgcatgtagagaagaatatcagctcccaacgtttcgtcacactttcattttggatgtaagggatgaactgcattccatcttgggtctgatcggaatgtagctatacatatccaggatttacacaccgtgtaatacctagtaaaatagcagtacatctctgggcatagatagcccttggaatggaaagcgcataactaaaaaggcttgatttggggagacacggggatcagatcctgagtctcctacatcttttctttttttttttcttcctgtgcatttcgatgtcactatattttagatagactgtagactttatgcatccaattgcgaaatctgagtcgcagttttgtcaccaactcatacaatcaccttttacagggcacattgattggatagatgcaacatttatgttgtaataataagcattcccgatttcacaaccaacttttgtatcgcccattattgattgacgtcaactttggcattcctttaacttcggacgtagccgtacagcacatagttagtgtcttctagcttccattttttcccttgcatatacaattaatttaccccatagtaataaattaccggaggctgaattgtacatttatcccgcataaaccagattaatctggatgcagtaaggtgggtactgagtttcaccacacgcctcttgagaaactgatatcacatgagaagttatcaatctgttgcatttcatcatattgcataataatatcgtgggctgttcacctcaaaaaaaaagatacacaattgcaacgtattcaatatctcaattaggacacatttggagctggtaaaaagaaacatcacagccctcaaccgaccattctttcacatccgtcaatcccgccgacccaaatagtacttgacgctcgtctgtatcatacttgtagctacatccgaaacgaatcttctcatgcttctcgataacgatgtcgttcaatgggcccccaagtctgacctccttgcccttcgtgatgagagaggcttcgtgtcggcctagcatatagttccactcactcagaaagtaccaatcactgggctgaaataccttctcccccattttgtttggagcgaacagggtgtttccatagtccagggacgctaaagcaaaaggaacgacgccttcagcagtgtaggcgcgcagcactttggttggcattttgcaactatccaggctcaggagaatagagctttgaactgggctagcggccaacgcgttgcttgcgatgttctgaagaaacttggctgcatttggccgcgaataattacctactgtcagtccaaacaataggagacagtgcggccggtcctgtactcccggggtatctttcagccactgcactccatcttcgaaagttccatgaagtgcaccaattttgacaaacttgaattgttcgtatgggagggactgcagcgtagattgaagctccgaaaagctcagatcgagtgcatagaacgtgatgttcttctttgatgcctctagtgcttccagtaacggtaaaaccttgtccaggcttctgtacagcagtgttagctatctttcaatagaaatagaaccactcaggtgatcattttactaacgcgctcccaagatcaaccactacactgttattggcaatcgaatcaaccatctcagccgctcgggcgcgtagaatgcgcagctcttcatgtcgtggatagaagtcagcggcggtagagtgttcaatccagtgccgaattccttccccgctgtagaagagaagagctggaagagttttgggcgtagtagacagtccagccgtgacttgatcgggaatggattcctcgaatgtgctctgacgtatgtcaataatgcgtgagttgatgatagtcatattttcggttcctgtattttgctagagaacatgaattgcatcaagaattgattctacaccagactatctgacggctcagccacatttaatcctcatctctggcggtgagcacacgagcatctttgtagtattctcaccaaatacatcgatacgtcacatgtattaaatgagcaagtgagctcagcgtatctatcgccaagttttccaatgatcgtcgtcctgtcctgcacataccctccgagtcccattcctcactacccactcctaacttgctgatcaaaagcccctctcggtcccaccgtcgcttcagctgtaacaggcgggcgtagctctgtccccaatagacctgttggaaatccttttcgttcgggtcccccacgttacgataggataaccgaaacctcgggtcaatggcataaagcaagggcatgtgaatattcgtaaggttttgtaatgcacctgcttttccttcaatagtcggctcaaccggtcgcacgaagttgatcagctgagtagcattcctccaagccggatgcatggacgtctccatgaggtctccatttctcatgacttgccctccgaggttactggtgaacaatagatcgcccggccgcgtggggagttgggccagaccgtcggccacgtatgcaggccccttggaagcattgaataagtcgttagaaatggcgacagtggacccaagaacaccgtagtcgttatcggtgtgaatgtcgggaacctgtcgatagttcatgctgagtttcggcaatgatgttgattcgtatgtcacatgagtttcaatgcgcctcatatcctcaacaaatggctgcattcgctggtcgacatccgccgtattggtttggttcagaaagaacattttaagttttgcctcaatagagtgttcagatatcacagtgatgatcagctgcccaccaacattttcacggttcaatgactgcaggacagtgaagaatgcagcaaggcttcgagaatattcgccgtgagattgggatgtctgcacgccgagctcagccgcaatagcagggacgtcgggaaacactcgcatagtagctcgcgtaacaattccaaaagtcccacctccacccccccgcaatgcccaaaataggtccggattccgaatagcgttggccagaacgatgtctccctgtctcaaggttagaaacccacaatattgtatggcatcaggctctggcaggcttacgctagcggtcacaacttcaaattccagaacgttgtccactgccaatccatggtgtagactaagaaaatctgaaattcctcctccctgcaggaatcctcctacaactccgactgtaggacaatcgccaccgacaacaatgtatccattttgtgcggaccttgcgtataggtcccccatcataacaccagctccaacactcacagctggaccgaaagacttttcaaatccgtggagctgaacattatcgtggaatttaatatcttgcagccggtgggtatggatctgcaatgcattgggcgagctggatcgacccgctagatcatggcccgtgttccggatgataaggcgaagatcgtggcgtttagcaaacattacggcttcttgaacatgctttgtggagttcaccattgccgagtaaagaggaatgcgcccttggtggcattgggtatgaccattcatctgagatcccaatgggcatgcatcaccaggggattggccagactcccatacccaatcctgcaatgcacctggttgatagtctcagctgaggaatcttttttggaggtacccaacgtgagtgccaggcttaccaggttgcgatgccctccatccactgtcccttgacatacgcatcacatcctcgcataaggtgtgatcgaggctatggttgtaacagactgatgcaataggttgtaacctaacaagagtgaactccatcgatctgtttagtaattcccattgttcatccgacggccaacagggttcccacggctggcaacgacatgaagactgtaagaagtgtgtaaataccagccaactgagagctatacctagcccagcagtccccagaaaatgaaacatcattgccgattggtggtggatttctatcaacaaaaagaatgtgcatagatgcggttcagaattctgtaaatccaacccattttatgcttgcattcaactaaaaggcggtggccagccctctagattatttgatgagtttccaatattacggccaagtccgagagcaaagcacaggaacatagttcgggcctacccgcagtgtagatgtaacgtatcgagagctccactatatacgtaaagggtgagaatgaacagtatctcgccatatctacgagagtgttgatataatcaatcatgatcagctgtatgtgtgctttcctgcaagtctttcatcccttgattctacggtgtatcttgcatatttatcctggtttccgtgatcttcatgatcatcgaccattctattcaatctatagccgtattcactgtggaaagatatagtgtcagctttggaaatatatagtgtcagttgtagaacgtatagactgcttcattctacaactattctattgtgttaagcagctgtcactatgggctccattgaaccacctaatgcttctagctgtcttgtataccagaccatcactgagtttgcagacttccccgatcacgatcagaagctatggtggcacagtacggcacctatgttcgcagaaatgctcaaggttgctggatatgatattcattctcggtacaaagctctcgggttataccagaagtttatcattcctttccttggtgtctaccctaccaaaaccaacgatcgatggctcagcatcctaactcgatacggcacgccttttgaactgagcttaaactgcacccactcagtggtgcgatacacctttgagcccattaacgctgccaccggctccctgaaagatcccttcaacactcatgccatatgggacgcactcgatacactgatccctttgcagaagggcattgatctagagttcttcgcgcatctgaagagggatctcactgtcaacgaccaagacacggcctacctcttagagaaaaagaaggttgggggccaaatccgaacgcaaaacaaactggccttggacctgaagggtggcgagttcgtgttgaaggcgtatatatatcccgcactcaaatctctggcaaccggcaagccagtccaagagctcatgtttgactctgttcatcgcctttcccaccagtacccgactctcgccgctcctctccgcaaattagaagagtatgttcactctcgcggaacttccagtaccgcctctccccggctcatttcttgcgatctatgtgacccacgtcaatctcggatcaaaatatacctcttggagctgaatgtctccctggaatcgatggaggacctgtggacactaggcggccgacgaaacgatacccaaacactcgctggattggagatgattcgggagctatgggacctgatcaaccttccaaccggtattctctcgtacccggagccctatctcaagcttggcgaggtccccaatgagcagcttcctctgatggccaactatacccttcaccacgacgacccaatgcccgaaccgcaggtctactttacgactttcggtatgaacgatggccgggtcacggatggactagccaccttcttcaggcgtcacggctacacccatatgctgcagacatacagggatagcctgcgtgcttactagtgagttgaaacaattctattcactcaacccgtctaacaaaatctagtcctcatgtggatcatgacactgtcaactacctccacgcctacatctctttctcttaccggaaggggagcccgtatttaagtgtctatcttcaatccttcgagactggtgactggccaatctgtgagtcaactttctactcaaattcccatgatcttgttttttaacgcggttttccctcttctctcatctagctagcttcggtgcgcctatccttgagcctgtctctaagaagatgtgtcgtggccatcctgtctctttcgaggtacctttgacaaagcagcaggtggtggccagtgagtaaaagaaaccatatttggcgactttcaggcatagggatgtgaccagaaagaaacactaacgcgaattccacgatatcgcggtatggagttgatctagatgtttttcgaggagatgtgcaatccaattgatgaccggtgtaaattgcaggctagatggtaggagtaggttaaatgatttgctggaatatatgtactcttgattttctgaatattgatgtcagctttgaaatggatgcttcaacgcctagaaatgggtgtatgcggagatttgtatggtgggaatagcttcattttttggggaacagactttgcttattaagccctctgtcacatgcccaggtggggtctaaaataaggcagaatttagacacattcaggcatcaaccctgcaaatcaggcatatgacctttggcagctctgccctttcgcacgcggcctagaatgggtacgtacacgtacatatacaacctagatagtagagtcgttcgattctgaactttcgaaaatgcccaactcgccaatctgcgcgtttgtactactcgaactgattgttttccccagtctttacttgcccctctcacttgagaattcatatagttctaacaaattccttcttcttgctctcctccatatctctcttcactgttagtactccatcatgcttgaaggtaagtgtgtgagcggtgtttttgttgtatgcgcgttcttggcagttcaacttccccggtcaaattttcccgctctgcttcttatctcccaatcaacccgattcagattgtcggagccctgtgagaagtccacgaccggttgttggattaattgtatccttgatcgtctgtgtaatcctgtctttctcagtcggctttcccttcaccaattcctgtcaacccgcctcctacctttttcccctccatgggtgtcgcaagactcaccagacgaagcggtctcattgcgcgcgcagtgtgggattccaagtactcaccgagacccctgctcaccacgcagtctctcgtggcgcgcagcaagatcgctctgtccccgcatcacaccaagcccttctcaacctccccatccctatcctgcgcgagacaccaaagcaccagcggagaaccaccgtcgatcgcggaaccacctgccaagcccaagaaccagacccagactgacattcctggtgcggatcccgcagaccgatatgcagcaggcctgcgcctgaacaaggaatgggctgcccagacagcccgcaaccagcccgagctcttccctaccctggcctcgggccaaacgccgcagattctgtggatcgggtgctccgactcccgctgccccgaaaccaccttcctaggcctgcagcccggcgacgtcttcgtgcaccgcaacattgccaacatcctccacccgggcgacctcagctccaacgccgttatcgaatacgccgtgcaatacttgcgtgtcaaccatgtcgtggtgtgcgggcacacatgctgcggtggtgtctcggctgccatgggcaataagaacttgggtattttggatccgtggctgtttccccttcgtcagctgcgcgagcgcaacctggaacttttgcagtcaatgcctgctgaagaggcgtcgtcgaagctggccgagctgaacgttcgcgagggcttgaacattgtcaagcagaagagtgttgtgttgaacgcgatccgcgaccggggactgcagctgcatggcttggtttacgatgttggatccggtgtgctcagtgagctggacacgcaggactcggaggaggttatcagggcccgtttgacggcttttcaaaccgagtgagttagcggggttttttcgggcttgggactctttcggccgaaggccacgggatgtacggagtagcagaagcgagatttgcggagtaggacatttctggatagcgacagtgtgcatttgatgaattgatgataattgtaaagtaagatttctctttttttttggcctagagggatctctcgttctctcagaatgtaaacatgatggcatgatgtgtgggtagccgatgcgatggaaagaccaatcagaggagacggtgaggttatacgaagtatgtctgccaaattgggaggagcaggtatcttttgtatagcaactccatacaaaaggtacatatacacctagacacgattaggtgcatgccacatctacctatatatgtccatagccttgcttgtcttatgtttcttcttttcagttctgtttgtattctgcaatatgccagtgatctaaggcctagatggtgtaacctcgaccgtttgactcttcacagtccttcaccgacaatagttatagacaaaaaatgacatcagtaccatgttatagaaagaaggttatcaaatatacaggcagaagcaagcaaatggtttaaatcgtaccaaagacgtgtctcatatacatgcccaggcggacaaacatataagggtaatccttcccacgtccaaccttccaccatccacctttcttctctgagtactcttctcactgaaacttctgatccccttccagtttctctgacttgacatccattatgaagatcgaaatctatgatggagttggtggtaagtctatattccttctgacatttgacctatcattcacatgccaacgatcaaagctgtcgatgatagcatcacagaacccgaggtccaagaaatccagtatgagcctgagggtaccctctgtgatgtccgcaccctctaccagaaaagttccgatggttggggccaaccggtatggaccaaagaaatgcccatcgacttgcccgcacccgtcttggatgcagagtcagcacaatacgcactcctcacgaagaaggtgaagtgcttcgatggacgcaggagcttgtcgattcattccgtcgttgtgcaaagcgagcgtctcaatgagttcttgaaagaggcaatgaagggttatcctagtgtcgccctgaccttggatcgccccgaattctgctcgcctttccgggctttcgttcatcgatgggaagaaatcaccaaactgcgggacgaagtgcaggatccaacaaccaaggcccatgtcgacatgttctaccgcatcatggacgaggagctcagggatgtcatcgacagcaagaatgagctggttgccaaaggggtcatcacttttgagttggtttggacaatcatcaaaccggacgatgtgatcctttcttcggccaaggaagggctccgtgcttattcgtccacacgcggatcgtcggacggtgagggatcgccaattgattatttccaagccgaatacgtcgaattcgacggaaccaagttcggatacaacaccatggatttcatgatcccccgatttgaaggcgctatgccaatcacctcgttgactatcttcccgctcaaattacaccccgcgaaggaggcggtccaggagatgttgactgcacgaggcaagaagtgggaagccctcaaggggtaccatttcagatcctatgattcttcaaccagcaccaactccaagggtcatgtcaagaatcgcgtcatcattgacgcccaggcatacaacaagtttgcgcaccacaagacaatcaactttgatagggagattggtgaagaactggatgatgctcagcgcctcattgcaaccccaatgctcaacggatatgccctgaatgacaaaaaatggcgttcgttccacgtggatcatgtgcaagacattgattgggatgagcaggcttttgagtcactggtcctaccgcgggagcagcaggggttcaaggacgtcatcttggccgtcgcaaaggcccagtcccagaaaaaggatacatttgacgacgtcattcggggcaaaggccaggggttcattgtccagctcagcggtcctccaggtgtcggaaagaccctgactgcggaaagcgttgctgaggtcatgagggttcctatttatgttatgagtgctggcgaccttggagtcgaagccaaacgcttcgagtcaaagttgaaagacatcttggagctggttcccaagtggggtgctattctgttgcttgatgaagctgatgtcttcatggaagcccgcgattccgccaatctcgatcgcaatgaacttgtctcgctcttcttgagaactcttgaatactacgaggtaagctctgaatttgggcgaagcgcacaaatgacatgatactgatcttttatctttctctccagggtattctcttcttgaccaccaaccgtacgcagaacatcgaccctgccttcgattctcgcgtccacctttccatcgcctacaaggatctcgatgcggaatccaggcgccaggtttggggacagttcctcagccgctcgatgaacattgaagccatcacggatgagcaacttgaccaggtggccaagttgcaattgaacggtcgccagatcaaaaatatcatcaagaccgctggtcttctggcttgttccaaggagcgtgagatccgatttgacgatttgcagacggtgcttgctctgagaaatttgcagaagtgatgcctggtgagacaaggggcatattccgtacttcatgatgtgagtgagatggtagctggttggaaacatccatagacttgatattgaaatccaaaaaagcatgattttatgcgcaattttgtgtctgtaaaaggcggaccggtgaattgcctcttggttagttttgctgtttaggtttagcttctgtaacataactaggatggatactgttatttttcattcttgatacagaccgatcaggtgatgtgactaggattcaggccgaaacgtttgtcttgtttgttgtgatttgattactagtacatttgttttgtccaccagattgtgatttccggactacaacatagtattgtgaatttagagagtttttattgggattattatgccacgtacacacttgcattaccaccgtttatctgtcaatctcatctctttaccacccaccgccttgtctggttgtaaactgtgggctggtactcgtaaagcatacacattttcagacacatgcggcagtgtcagatggattccctgagggtgaggggctgttggcacataacagcttggagaggagagggctggtgagtaccacacttcccatcgtcccccgggggactgaaattgcctcaggaagatggtatcctggtaagtgctaatgagcccatattcgcaattcaacttctgcatatctcgcaggggttacgcgagagtgcgccgaagctctgtcctcatggcagtggccgctgcaagatcatgctcatcgacccacaattctccagcttgattcggttgtgccatttgcgtcttgggttccttcgggcggatgatccaggattctgatccgtaggaatagttttatagatcccactggaagacggattccctatcgggttggtgagtcgtcttggcgaaacaattggtcctgaaggaacgataggttcattgaccgcaatggtagtctcctgatttagccctacaacgtcggggatgttggcatgtacttcctgaatacttataatcctcaaagtagatgtcgattgggtggtttttcaaggctgtcccaagtacatggcctatggcctttgaaaactgccccggagaccgggctcatcagtgatgtacgcccgcgtccgtcagcatttccagtcagagctatcacgcatccagtccaccctgtgagctgacctcaccaatctcaaaattgcgtatgtcacatcggataatggtgtaggatccaagttatcgggatcacggaatccagaaatatgcccagaaagcattagctcaccattatcgatgtttgtaggctgtcgtagccacctacatagatttagtggtggcctcatcataaatgagtttcctcaaacagcaaattgacgatgcccatacatccttttgtagctctcttcttgatattagtactggtatacaaagggagtatatatgatcttacttataagtagcgcggaaaacggaacgtacctcctcccggtattcgagatcacgtttccagtaaggaacggagttaataggttcaccggccacccgcgtccacacgacataattgatataacctccagggacgtagtctcttacaccttgcacccggtcaccatgaccaagtaactttgggattgcagtgcagttcttgtgatatagactttatcaagctcaacgccatcgaacaacttgactccgaaggggctcaggtagcgaaaaacatccaccagttaggccatcagaaacaggaatacatagcttggtacaccgacgacgcgacgacccagtacgaggaatacaaagactggataaatgggtacaataaagcccataccgctgagaaggaacgtgagatcttagccagggaacttgctgcccaggttcagtctgtcaaaatggatttctctggggaggttttgaaatctctgctcctccactacgtcccaaacctcgacaccctgacgcaggaggaagcacagcaggattgaccttgcaatcggatttccttttacaccaattttaatatccatttttacaagagccctcggggcgagggcttcttcggaaggggcgcctgttgccacttggtcatgtgaccgggccttccttagtgtagctcgcagactagcttaatcaatcatctcttaccatccacactagttgtaccaacttggtagcatgtcttgagatccacatcagcgggatcccctgagctagaaattttcttttctagtaaaatagccatcggagaccctctgcaaagaggccagtcccccagattccccgacaaagccagccatcactggcaaaatcatcagtttcatcagagcggatggacaaacagctccacagagccatcctcctcgctgtacagctcgataattacatccagctcgaccaaccttgtgctgacgaatttgactctgacacgaagtcaaggatcagcttcctactgagtccccactttaaccatcccacactacccaaagcagaagatccatacccacctgactggtcgattcaccgaccaagcctccataaagcgactgtcgaatttattaggctttcccctttcatctctccaccgatacaggacttatgagagccttgacatccgcgtgggtatgctgagtgagagcttgctgagctcgagcttgagggggagtgataaatagtaccgtcaatcggaatttgatagtagaaccgtataaagctctgttgggtggggtcgaggaggttatggcatgagaaattaagtgccgcaaacggatggccgaggtcatcatcatgttcttcctgtgtcatggtttggaattcttcagacaatttatcatcgaggacaaatgttgcactgggtgagggggaagaatgttcaagcgttactttagtaccgtgtagataatcgaaatctcctagtcgagacattatgatgaatagagagagaaaagtgcgagataagagaaatgaaagagaagtgaagtgcagagagaagagaagtgcagagagaagagaagtgagagagaagacgagcatagcatatccatggatggaatatagattggtaattaatgccttctatccgtattgaccgtattgtaaaatgcaggttcaacttctgtatttctgtatcgactcctaatttgacttcgtagttcgttaactaaccggcctttgcatttttttacaaaaattacagaccctcctaacgtacgacatgtttgcagatgaccactcgctacttacccaacatggaggattgataaattctctggtacaccggcgtcttatactagtatagagcttctccaagagagcaaggtgctatgatgcagaatagtggaaaggcagccgtttctaaaagcggtaacttcggcataattattatcttatgcacacatgcaagttgccgagacctccgcttgccggctaagcaggcaacacccaaacatcctcagccaagacattgacatctcccgtcaataatgcaatcttggcagaacttggaaaccaacgaaataatcaatctcatctccagttttccaatactccggcaggccccgggggtggcccttctccccctgaaccacatctagaacatatagggctacggggctcttcgtattcgcataagcagacggcccactccggtccatacatgcgttatgttgccctgcaatatgacaacaacatggcctcttaaggctgaacgaatgacatttccccggagcgccgatcatcgtcgaaaagcagggtacacagcgcctaaacaccacaccatgacaccccagggctgagcaaagacccccttcaggtccaccttgtgttggctagtgcacccgcacgatccgaccatttgacaattatagccctggcacaattccgatagcatgttgtggagccgagtcaagatctttgtcaccctatttttccctgttttccctttttttttcccctgccccttatatggtataagtataaacggattgaaaaacagtccgtgttgaaagatttcctcatgttggccgcttaagcgctgggccattatgattgtcactcgttttcatcatccgcagcgcttgattttgtcgattttggtgctgtccggtctctgctccaagttgctgcacatataccagcatcgatcgcttcctctataccttttggcgatctatttcccgacattctttattcaggaggtcctgctattcgttacagtatggattctcttatatacaacctccggtcggtgggcagtagccgccgttatcggttcagcgattatcgcgttggttcaccttttccgaaatgcgacgcgcaacgatattgacttctaccctcagatgcactgatttactagcaaccgcgtcgcagtttagtttttattctcagaccggcagcgaaattcaatgggatgcagccaggtccgtgggcgccagtcgacagggacagaagttgatattgagcggactggtgccaatggctgccactacaacagttatcgtcgtggcttcgtggcttatggcccaaggaatctggaatctcatgacccgctggctatgctccctcgcccatctcggagacgccaagacttccgccgtcttacccggcccctcagatttgagaaatatactagtgtcaaatcgacctcggctttggacgcttgtggggactggagtcacgatcggactttggctgattcgcccagcaatcccatacaatcacatgactggagctctgcccttcaccatgctcggcgaacactctcgggctcgtcagatgaccatcgaaacatttccgctaccagaattgctagcggagcgataccgggaaccggaaaatggacactacaaggggtgggcaccgacattggacgactcgagtaacactgcctatggaaaaaataagccagcctgggcgcaaggccctcttcctgctgcattcgagagatggattgtgaatcccgattcaaatacggccgactcgaccattcaaagcctgtccaggagaggcggaaacaaatcccactctgaaggccagaataagacagctggaccgcgacactacttctataaccccgttcaagatcccctgaggataaacaatattgacctggaaccacttggtcctctgcaggaggctctgaaggaccatgccatcccaatcaaccatatcgtctttgtgtttttggaaagcggcagaaaggatctgttccccctcaagaacgattctcgactgtacaaccaaatccgggaatcatatgaaatatacggagaggaggatgaagccgatctgcacgacaagctgtcccagttaacacccgtcgcagagatgcttacaggggagccatccggcttcggcgcttcggtgagctcaccaaatcccggactaggtggtctcagcttcgacgggatagtgtcggggagcagtctctctgcgaaatcgcgtcttgtcaactactgcggtcttggaccgctccccgtggactttatgcatgaaaatgatatcatcccataccagccgtgtctgatgcacatcatggatttattcaaccagcgcaagaattcttctagctctaggaattctaccgatagtcacctggagcgggaatgggaaaccatctatgcccaatctgtcactggggagttccaggagcagactcggcttatggatctgctcggtttcaacaagacattgtactcggaggacattgatgtggaggatgcgaagtatttccatgaggatatggaaaagatcaattatttcgggtatgttatcacgcagtatacccagcaactttcctcgtgtgtaaatactgactttgcatagttatgccgaaaccgaggcccgcccctacatcaaagacttaatcgacgaaacgcttcgtcagaacaagagactcttcctttcgcatttcaccagcaccactcaccacccttggggtacacccgagggctggaaccgagagcactatttcggtgatctccacaaatcacaacacgaactcatggatgatttcctcaacgcaaaccacttcgttgacacatggctcggcgacttaatgggcctgctcggagaagccggcatcgccaacgagaccttgacagtctttgtgggagaccagtacgtgcaattacccaccagtgaccaaagaacctgacatctaaccaacgaaacagcggccaagcatttggagaagactgccccatcacaggaacctaccacaacccacacatcagcaatttccgcgtgcccctagtattccaccaccccctactaccccgcatgcaccttaatgtcaacggcagcgccgtatccatcctcccgacgatcctcgatctcctagtgaacaccaactccctcaacgcagacgacaccgaaatcgccctagatctgatgaacgagtatgagggccagtccctcatccgcccgtatcgcacctcgcacaacggccgcgaagcctggaacatgggcgttatcaatgcgggtggctcgatgctgagcgttgcctccgctgctgtgccctggcgtctcaacctaccactgaacaatgacttcgagtaccgcttcacaaacttgaatacggacccgtacgagcttgagcctatcaccggctggacaatggactctcttgctgcggaggtccattccaagtatggacaggaggcatttgaatgggttcaaaaggccgagaaagttggcatttggtgggttgcggagcggaaaaagctctggaattatagtgatcctgatgagtgaggggtcgtttatgacggtggatacctcatgttttttttttcttctctttttcgtccttggagcgaacttgcatagcatacattctggggtacatgttttgtttttgaggctgtgggatagtttggttccctaatggctttgtataatattcgggttggtagacctgctgtatataaaaaatatatgaatttcgccttttttctaagattccgattagacacttcaatcattaatcagtatctgcgtatcaatcaggcctattcatattattttcactgtggtttccttacaagacttctcccctgactagtagatttctttttcacatcattggggtgtgttggcgacccaaaatatggaatttgtaatgctatccggaatattatttagatttctccttcttttacaagtgagcatatcagatcctataagaagggtctttctgatccaaaagcctcatataagcagacatctccttcagtccaaacttagaccccgaaaaccctttctctcgggtggcattccaagttctctcaattttgatctcctctggctgaatcaggttccccttgtccccaagcgcacacgccgacgcatgagattgaatctcagaagcagccagcaattcatacatcaaataccaagcagcactaattgtctctgcagctgtgatgacaccatgattccgaagaatcatggtatcagtcgagccaagatcttcagcgagactcttctgctccccgcggttcgtcacgataccttggtagtcatggtagctaacagggccagcctggtgcgtcgtctgcgccaactccagcagtccatccttagtgcacgccagtcctgtcgcagggggataatggcagtgcatgacgcttgccacgtccggccgagcgcggtgaatggcactgtggattacccatccggcgtcgttgataccgaacgtgtctcctgtcacaccgtggtccttgatcttgccgtccgcgccgactttgatcagacttgatgccgtgacttctccgtatcggagaccgaacgggttgatgaggaacgagtcactgccatcttcttccttgacctttgcggtgaggtggttgtagatgttttcgttccagttcttgagttcaaagaggcggtaggcggctgcaagttcgattcgagactttacttcttcgtcggggagccatttgaggattgattgtccgagcattttgtgaactgcgggggaactgtatttggcagagggcacgtgtgttgcgggatcaacggctgttgcataacttcgtggtagggtgattgttgtagtgcctatctttgggatacgggctcggagcgagcctgtgggaatgcggattgcatgtcgaagaaccgatggggcggttgctaaggaggccattttcgatgtccacggtaaatgtggtttatgacggtgtgatgaacgtaggcaactctggcggagatagtgaaaggctgtttgttatgctggaaatgcctactaggcaaggcctttttatacttgccagacagcttcacataacgtaccttgatagctctaccacagatacgtcaccgtgagacaatgaagatatgccaacatctcacaagaaaaaaaaaacgtttagccaaggttgcaattcacacatggacatgctaagcattagcaaggccaatcgggtcgtcgggaaagtcggcataagcttgctccaactaactttatatcatgattacaccacgacccaggcgtggaatcttgcttttgctgaaactgagcttggttgtaacttgtcaggaactcaatgccatactgcatagtcaacggccacaaccttagctaggagagagtgcgttgcatcgattctatatttccgaatttgtctatcaaacattagcaatcggcgtgttatgtactcttcgtcgaataccaatgttggatatatggtcgagtatcggatatgatacccacaattatgtgtccatagtaagtggataccacatataattgaaattgccaccgtagaaagaaagagaattacacatcatcaagatgacccattcaatacataacctgttcagtttcaccatgaaggctactgatcctgaacatcacgtcaaggtgcaagttttgcttgggtgccattgcaattgagagatcacctgatctagcaacaacataagctatttggagtcactaccataaagcgagaccacctggtctattaattgctctatggctggtacccacatcataccctcaacaagcatgtgccaagctgaggcaagccctccatatagccttggatgattgagttaactacggcgcactggcggttggagccgtgatggcagtatccaaggcggtcagcccctggaaatgcaacccattatgaagtgccaagtatgtacacaatcaaaatcaagactcggagaattatgcttatttagctaaatttggagggcgctagcaaaatcggggtctaaagctaacaactttatagtccattttcaatgttgtcgccctgtagacggcgattattaccgacagccgagaagtgctgacgaggcctcatggatttgcggtccacttgaagatctttatagagcctgacggggaaagagcaccgcattttcacgtttcacccccttcgctgcgtcagatgatccaatcataaccgcctttgtttggccctcctgcccctaccattcgcccacgggactgggcgtctcctgcgatccgcacatatcttgccttgtctagaccccagcgatggtgccccttccttttctcttcttcatgacttccctataccacgctcgttaagaatgctgtttttgtgcttatcgtggctgtcatggctgtcatggctgtgccaaaccgcgctggcgcaatattccagcgacgatctcatgtcattcgttacagttcgtgtctaacatcccacaacttgaaattgtatgatcgctaacaccgtgttctccagctccccgatattcgggcagtgaaattcaatgtccagtaccagaaccgcgagcgcgtcagccccggttactggttcgtcgctccttatctacacatcggccccgacccaccgtcgaccttgtacgagcaatatcaaatcggaccgcatatctacgatggtgaaggagtgcgtttacaccagtcccccgcgatacagatcccgacagctgaccatatgtcggtataatagcgccttatctggactggctcgcaacagttcgagaaccgaaacgtgttcgatttcaaagtcgtcaacagcctaggcccggacccacacctctcgatggtcttgcagaactcgtgggatccggcaatagacaccgggtacggggtgatcttgaccaacgattatcaagttcaacgaaagcttcctttgcgaaaggaccttggctcttttgacatccacgagttcaatattctggacgacggtaagactgcgctggtcacggtctacctttctcatgaggttaccctggaggacttcggtcgcccgacagagactacctggcttgagaccggcgggtatgctgagattgatctgaacaccgccgaggttatccagtcgtgggattcttataagcgcattcctttgcccgaaactgtgcattacaaccagttttccccagtggagggacatcctggctgggattatgtgcatatcaactcagtcgacaagaatgaaatcggggactacctgatctcgtcacggtttgcgaacaccatctacctcatctcctgcatggatggaaatatcatgtggcgattgggtgggaaatacagtgatttcgagcaagatttcacgttttcgaagcagcacgacgcgaaattcatcgagtcgaatgggacacaccatatcatctcgtttttgaacaatgcctcggacgaggaattcaatgaggaaaatatatcatcatccctgttcgtcgagttggataccggcgcgaggcccatgaccgccagagccatccggcgctacaaccgccccgatggccagctctcgagactccgcggcaatactcagctgcttccgaacgacaatgtgttcacttgctggagcaaagagggctatatttctgagtatgccgccgatggcgaactcttgatgaccgctaacttcacctcctcacgctattcatcataccgcggatacaaatttgaattcaccggtcgtcccacggccccaccagacatggtggcgtcggtctacggcacggatgcgaccaacatggtgaccacgttctgggtcagctggaatggcgcgacggatgtcgcatggtggaggttctacgcgcaagcctccgaattccacgaccctgtccttatcggcaatacctcccgatccgatttcgaaaccatgtacattgcccgcggatatctggactgggtgtctgtcgaggcagtagatgtcaacggcaccgtcctaggcaggtcggaaatgcaccgaagcaagtcccccgactggaaatctgtcggatacaaagggaaatcaagcccacctattccggccgacccatcgatcgtataccaggcaagcgatagcgcagcagaagacaaggcggttggcgactctggccagatgtcatcggatgcaatcgagacccaaacagagaagaccacccaagtcctcaatcacacatacaatgctatccgcagcattggcggtgttttctctttcgttctgcttctttgtctgtttttcgctgtcatggcatcctatttggtcatccgtggctggcgactccgggtctaccagcgtgttcgtacggaagatgggggttcagaggagcgggcgcatctggcaccgttgcatcaggattgagtctctttggctttgattggaagcatacgctgtttgcattatttgcgggagttttgtacgtcattttctgggtctttgatgggctcttgtccaatgtgtatatagtacttgttattggtttcgccgactacctggccataggggagggggggggggtttggcttttgcgatatcccgcgatttgttcatattaaacctcaactgtgattcagttctgatatgtggaatgaccttgtttgaagtacgatcggcgacagagccaaatggaataattgtttgacttaagggcttcttcctaaacctaggatctcgtgtaaacaaacaaagaaggcgcaatgcatgtgacattgacatggacagggaagatgcgagggagctgtcgcccttaaggaaggcaccgtttgtcgagggtatcaaaggacccttccccccatttctcttctcttcttctccttctcctctccccatctctctggccaccatctcaccgtagcccacgagacagcgcaggcagggggacccgtagcacatgctgcttcacctaccacagggaccatgaaattaccatatgtatgaggtccatgtaggtctgcatcagataacaaaccgggctttctcggggacgttcctgaagtcgtggctctcattgccacttgacgagtcccacggaatacatgaggggtgtaaatcttcgtagccgagggcgggtcgcgtaggtttgacctccatgtaagcatcgaagctcagctacctgactggttaatggatcctcgctcccctcatgtcagcattggaacctccaccagggctgatccacagatgcttctttgatattcgagtggatcccactgtttacaatgagatctaggtcttgaagacatcaaccatgagaccctgcacagtttgagcgttgggaaggattgcatctggccacgatacggtgtactcggactttatgcatttctctcgtgatgcaggcagctcttgtatcggtcgccgaaactcttatcatggtgatacaaacccgaacaagagaagagtaagaaatacccctcatgaggggtatcacttgaggggcatcttgtgaggtaaatctcaactgactattttatgtctcttttgatcgtctattccagagtgtccgtcaggaaatcgagacaccggtcgagaccctgtgttatctcaccttggaagatatcacacaacatacctttggatatcaattgagactgtttacactattggagaggccataggaaagtggtcctaccccttgttccggcccacaaatttacttgataagaactgaaaatgcccgcatcgtacggcgcttattcccgatactgacaaatctcgggaataaaagtcacagcattcccgaagttattcccgaagtgtctttcccgttatctataatgaagtactccccgtacgtactctggttcgactctttctttttcgtcagtcatttcctagagctcaatcttggaacccatctgtttattatccaaccaaattcgcaaggaattgatacccaccatgccctcaacaagcttatgccaagatgaggcctgccctccgtacagccttatggatgattacagtgaaggagcccacccacaaatcctggaagctcttttgcgaacaaactccacacagcaagttacatttggaaacgatgaatacagtatctgtgcacgacaattgatccggaacaagatcggttgcaccgaggacgaggcgggtgtcttcttcgttcccagcggaacctccgcaaacctcatttcaatcgccagctgcctaaggccttatgaagctgttattactctggagtctggtcacatcgcctgcaaagaggcaggtgcgatcgaggcgaccggccacaaacttatcctcgtgcctgcagtcgacggcaagatgacgcccaccaatctccaaaaggcgctccagcaaaatcaattctaccctcacatggccaagccccggctactttatatctccaatgcctcagagagtggcactgtctacacgaaacgcgagcttggcagcctctccgcgatttgcaagcaatcaaatatcctgctcttcatggacggagcacgaatcggctcagcaatttgctcaaagaagaacgatctcactctacgggagatcttcgacatgaccgatatcttctggattggtggcaccaaagctggcgccctgatgggagaagcagtcgtcctcaagaaggagctagctgatggcttcgatttccacctcaaacagcatggcgctttgctagccaagggccgtattttcggagttcaattcatggagctcttccgatcagacttattcttcacactagccacgcatgccaatgagatggcccagaagatctcaaacagcttcaagaagttgggttataagttggctgcggagacagaaacaaaccaggtgtttgttgtcattcctcaggaattagttgaaagactgcatgagaaattccgattctatgtttgggagcagcttgatgatgggaactccgtgattcggcttgtgacctcctgggccacggatgagctggaaattgataagttcaatgcgtgggtgcaacagtggacagtggaaacctccagttgaagtaatccgccgtccattaaatgctgccgacaggattcgttacatatttcgttatcactatagaggtaccccatattaacataatacccgactcaataaaaccatcaatttcaacctattcacctacagtatctgcgataaacttgtatcatataggttcctaagatcccgctctatcctcccgactagcaaggacatgaatgcgctaggccttctcgactcgaatgatctacgttctcacaacaagctaggaggtgtcactgatttctaagaagtcgatagtcccaccgtgagcttccattcattacaagctatgctgttcggtgccggggcgcatatgtttcatccaggctacgcatggctggtttccagcgcagacatacagcgcccatcacggctgcagaagacagggccactgccacgtagaaagtatgggtcaatgccttattgtatgctttcagcaccgtgccatattgatccgagggtatatggtcacttatttctgttgcacccatgctcaagacggcctgagcatctattccatcgacctcttccgccagatacctcaccaactcattggtgaacacattctgagcaactgaaaccatgatgctacccataaggttctggcagaacatgatgatcgctgtgccaatggcaatatccgcgacgggtagagcctgggcagttgtcagagcagtttggattcctaatcccgaccccgcaccgaagaggatctggtatcctatccatttacctgcccctgtatgtacctccagtgtacttaggagacctgatcctgtggcgatcaagataacagaaaggcaggcgaagggagcgtgacagcccgccagagaggtgagcgcaccgcccgaggtggaaaatatcacgaagctaataattgtgggcaatgtcatgatacccgagcgtaccggggatgcacctttgattgcttggaaccagatggggagctattgttcgcatcgttagcggcgcgggtcaatgaagaattggcgatacttacgtagtacatcagtgtgaaaaacgcagcgacgatacacgatccgtacattgatgagccccagatattcctattttggaccacccgcatggggactgtgacatgggactgcactttggtgaacacttggatagaagcgaaggcgagaaggagaactggtccaagaactaggagagtaatgatacgtccgctcgaccaggcgtattttgtcccaccccactgtagagctagaagcaagcatataacaccagggagaagtaatgatacccctggaaggtccatctggcgaatcttttctttcatggacgactgagagaatagttgcggttggtcaatatcggcattgggggcgttctttataggtcgaatacaaaggaatatcaccaaggccacgaaaagccccaacggaaggttgatatagaagcaccaccgccatgtcaattgcgtattagttgtgaaggcgccgcctacgagaggacctgcgatggagccaacgccaaatgccgcgctgacaatccccaccatggaagcgcgatgtctaagagggactcggtgggcaaccagcacgaaagatcctgcgctaacacctccactaccagcaccggcaattgcgcgaccgacaatgaatgcggttgaggatggagcgacgccgcaaagcaatgatcccacttcaaagataaacaaggcagccagataaaccgacttggcggaccagaatgagtacagcttgccccagatgagttggattgcgcaaaaggtcaacatgtaagcgcttgcataccaacccacatcgtctagagcatgaaaccggttggtgatttcaggtattgccgtcgacacaattgtactatccaagccgagtagaaacatggacagtgcgagagagaacaccaccagtgatattgcgatccagctggaagtgcaaattgcggcactggattggtctgcttcaggaacatattcttccctatcgactgtaattgatgtcttgctctgcttttcggggtctgctggatgaccatcattggaggtgttgatgaccatgatctgctatgtaggttggttattgctgtctttccttttctttccgacagaacaatccccacgctggtagttacaataattatgaactgaatcgagcctaaaaggggttaggaactttgcatgcacagtctttgttagctaagctattacccaggggcctgtttccagggttccgaaggccaggtcaactccaggggcaaggggcaaagggaaaggtaaatggcgacgtattgcagtcgatcatcgtgattggtcgagtcaatctcatctaatgggaataaagccatatgcaagggacggcatcttctatcctctcctcagatctgtttaggctgaacgggtcgacattcctccttgcagcgtcacgggaacactggaatgtgtgatttggacctactaagcgcgctctattttagcggctgcaagtagacaaggcaaataaaaactatcatggcaattgaaccgcactgaacagtcttctagaagatctggcactgttttttgtctgttttcagtcaactattttggaatacacaagatatgcctcaacgtccatttcatactcggaggctccggttaccgtttatacatgtaccctgcccagacaaaggtcgaagcgtttggtgatacggcacacactaggatccgtttttccagatggagacggtagcacagccaagttcctccaagatgaatccgtttcgactggatagaacccatctaccggatctagtctggtctcgccccgaatatcgtgttgactaggcccgaagatgtcaagacagcgtaccgtgattcttggcagtctcgcagggcgcaaaatacaaactccagctagcttctcggggcgctgatgggtttgggctttcttagtcaagaggatggaagaaggcccatgaggattccagttgggggaaaaacagggagcagtaccatccgcaattttctcgaagaatccacgagtgcgtcccggtaccggctgtagcgatatggccttggccctcgtcaatgcatggcgcagcatgttgtagatgttattctcaaagtgctgctatctaccgctttcacccctgccgcgccataccgccttataccgcttttgtggtaaatagtagcaagacagtagatgcctgcaatttgtatgtaaattcctaatagaattaagtcacttttgtcataaactgcttcatcaactgtctcattaaaattctgcaaatttataccccatagatccaagtcagctgatcgcgctaaccatattcggatactaagatatccgcgtaactcttgcttcttcggacgtccaactgttcgattaatcgatacaaatgattgaattggtacaattggactcctatattgatccgatggcttaattctttcttaatatgtcacatggtacttgacagccagttcttttcaccacagcccactccgctcttccccgtatgtacactcgatgaggctgtcaatatcgtgtgatgcttgtcggtaagcttctatcgatcttatgcgtatcatatcatctaatctttcatgtagtcaggcaaaagtcaaatgtcttcatgaagggcaaccgccctgtcaacgttgcttgaagaacaaaaaccaagaatgcgatttgacagatccccgtgcctcaaaacagaggacacggggaaatatcgtctcatccaggaccccaagaaaacgaaaagcattgtctgccctatctccaatgatagaagatgcagaaagaagcacccctaggaatgtcaccgtggctcaagacctatccaaagatcccatagcagcgctatcgccagcaaccatcatcagcgcagtggaaacctacagaaaaaagttcccaattaccaattttcttcattacccgtctttgatctctgacatatcatccaacgttcactcggtggactccgtctttgtcgcctcggtcctttccttatgcgtgcggtttatgaacagcgatgaactcgaggaagaagaaacctatgccgactatgcacgcaagaacctggcccagcgcgtgcttgaagccccctcgctttatcttgcccagtccctcgtgatgatctcattttatgagtggggcactgggcgaccttatcaagcttggatgtatagcggtacgtatcgaatcgtcaactgatcgtagagcattagctgacgagcagcaggcatggcgacatatatgatacaatcccttctgaagatggcagatgatagcatggaacacaatcctcaagagtttcatgcatcccaaacacaatacgaacaactggtccgaacctactggtgctgctttgcccaagactgcgagctgagctccggggcccgtcagcactttgcgctatcattctctcagatctcggtccctctcccaatcagtgatcgggacttcacatttaatcatactccagccaacaggctgatgcctgctgatatgaataaagactgtctgctagcgaagaatcttacgattgagcatggcctgacaattgtcactcgagggttcgacatattcgtacgaatcctaagatttgctaatgaacatcgacgagcactggcttctttgtcttcagatgactcggctacatctccgctcctcttgacttggcaagtcctcaagaaggaattggatgaatggaggtttcttcaggatgtaacggttcagttcccagctaccagtgttcaatcgcacgtagcactcgggtacggggagctgtttgcatacatcaatctggttcattgcatgaggtattcgtttctgtttgcgcattacaggccgggatactaactatatctcctccagcatcctttttctccatcgggaccgcttcttatccaacctaaagccccattccgacgttttccatgacgcaaatgatgatacccaaggcgagcccgatacaatcaaacagctattcgaagccgctcagcagatcggaggtatcctcaatgcactagacgcctccggcgcacctataatgtcaccatattccggcttcagcgtctttgtcgctgctcatatcaacatgtacggaacaattgccccacagcgatatccgggtggtctcaaacgggccgaagaagaaaagagtcgaaatcttgactatctcgagcgactaagtaaactctggccggttggtcgcagttgggtgagtattgaaaagaaatctctaaccgaatatcacagctaacaataatcagtggcgaacagtacaagaggcaaaccgattctacgaaatagtcaagagtaaccaatcccactccgagtctggaatgcacagccctaggagattcgccctcgcaggtaccctggatgaatatggcgacatccgatctcgtccaagtagagacgcgtatgcgaccagggcgcgaacctctgaatcccgtgatacgcacagttctcatacttgtggaggcacttcatcgtcgcctgctcttggtgaaaccaactttcttcccagggagaatgctgccattggtagtcaccatgattttgaaaccgatatgtttcaatggccatttattgatggatcgtggtcccttgggtttgatgcgggattggatgggttgtggtataactcagggttatttgacccaaatccatctcttaggtgatgttgttccttttcgttggggtgtatatgtcgccgtgtgatttccctacgaactcacaagaagaaatccttttcgatatgatgttgtcgattgaaattttaccatcgccgtagatatatatcgccacaatttgtccgctttttgcatttcgaactttctagtaatacaactatctcattcaataaaaatttaaacaaatcttaatctaacattagaaaatgagctccatgtatacaaagctattaccatttgaatattgtgcataggcgggatgtgcgtggatgtatactttggtggacatcgcttataatggcaagatggccatgtcctcacatcagccagccaagtggccgagcagtaactcggccatcgcattcttccttggtctagtggtgatgatttccgcttgtcattaaaaccgataagcgcgggagaccggggttcgattccccgagggagagatttctttttttttttttcggtttagacttgtttcattaagcttacattgaacaatggatgggagcttctattacgcatagaactgacgcatttaggctgacttatgatggccttgcactttatttttgtgttatttttagccactgctttttttacaatgtttccccgttgtagctagaaaatgacagagaatgatggtggtggaacaatatatgaggctgaagttgtcgctggagtaatccaccttatggatccagggctatatctatacggagacggagacatagctcactccagctacgattctaggacagaaagcatctgcagcaaaaagagtccatagataactatctaaacattcaggttaaatgagaccttccttgcgattccctcgagacgcctagcaatgtcattacatttgcattgacacgggtctctgttaagcgccaatgtcatatgaaccaagtcgtgctccatggtaagaaacacattctcgaacttgtaattgccatcatcttcacggcaccaaaaggcagtattgcgacgaataatctcgctatccggggcccgagcaatcatgccgaatgcaatatctatgatccgatctgtgcgaatagacagatccactactgcctgagagacatccccgatgcgttcctttcctcgactatctggatcgcaccgtagaatatgggcttgggcatctaggttagctatgaagatacggcattcgtgcaagagcttgtcttgccaggatgaggatattggtgccatggttttggtgagtatgcgtgatagactcgagtagacgggggagttggagtatttatattaatatgattggggaggatgacctcggacaatgagagaggccattgttcgatttctgattgggaatacaaaggtatacaccctaacaaagacccaatcttgtctttcttccaaggttagcatgggacaaagacgatcatattacctggatatatgcgtacaacaacatagacatgtcgaaaagggtaaagagaaacagaaagaaaattcattagggtaattaatgagtgggtatataatattgagagatcggccgacaactcctagctcctcccgttaagatgtttccacggtctgtgatacaccacggtcttcctgatgccctcctggtcgttgatagactcagactcaccagcctccggggaccagcaaatgaaatcagatggctctggtcaccaaagtttgccaccttatcccagtcagtagcagtacgggaagccggggccgatttcctatcactcaacggatgggtagaggcgccattgtagtatttctgggacgagtggttcttcttgtagtgggacagtaggacattgaggacagtagacaggcgcagatcaatccaacgcctccctcggcattgctagtagaggttaggaaaagaaagaaagcaagaaaaactgaccaaaaggggatggggtacgacatacccggataagatgacacgaacgaacataaggccctcatcgcttgaaccttgcaacaccatgatcaatcggtaaagactgaacccggtggccagcccaccagcgccaagtaggcctaccacgcgcagctttcgattgcgcgacatttgcaaagaccatgtcaatggcaatgggagaataagaatgatgaggtcactgaccacactaatcacggagtcggcgatcagggcagcggtctggtctagacagcttccttcaccacgtcaccgagccagtatctgggaatgggagcacagatgcgaatcttgacgatcagagcaacggtgtagtagcagcataagcaggcgaggaagatatagataaaccagactttgctgcggaagggggcgaagatgcgggtgagaattgctaggagggcgattttgacgaagagcgccatcggacagtagagaatagtcgcaatatagcagaactttttgaatgcgattagctcgtgagggctaatatcactaagttcgtatcctcctccatgttggccaactagtagagtaagtatgtaactgggaaaacgtgggaagtatagcgcctaccgacgatggatattgcacaatatcccataaacagaagctgcgtacagtcagtcctggccaataaggcactagattatttgctcaacttacccaagcaatggtacaggcaactgagggagtgatcagtaggattgcagtatatgtatagagggagaaactcacggtcttcaactcctagaggatgcttgaatcgaaaccgagtataaaatcgcaagattacgaagatcgtcacgattggaatgcagagacattgtgtaacaagattgacagtatgcaagacatccgttgggttctcgacagtcatgatgggcttgaagttgaagtccccctccccttacaataaaagtaccggggaattcacaagataaagaacttcacatcgtggaaatgaggattgacagaaagacgatccttagcggggacttcaaagctatcgaaccactgctatgtatacttcgtagtggcgcgggatccatgacggtgataattgctcaaggggctgccttagacccaccacttggctcagttgatttctgaatggttcatgaaggatttccatcaataacgctaaatagcgctagactccgtttatactccaccagcatgtaccgacggcatgggtgccagccacccgggcaaataccatagtgttcaaaaagtctgttcccactgccccacttgctatccccctaacaaccatcgtggttttttttcttcttcctacacaccccccaatgacattgccggtgccacccagtcaaagctagcactcgattttaggtactcccgccgaacgatttacaatactttgaaacggttcaaagaacacaatactgttaaatctctcccttgaaccggtcgcccaaggatctttagtgatcgaactcgccatttactttttatactcgcccgccggcaccccttttggtcctataaaacgctgagttgtgctatacctggtcatccatcccgctctactattattaacgttttaaggctaaccggtcttctaaaatataggacaaaaaggaagattctaatcggaaaggaattagctcgacgacgatatcgttttattcaaaaatagcgctctgagtggtctagaaataacgtttaaaactaggtcttctcggatgagtattctgtacaacgaataacaaactgcagaccacaatggtgttggcgctttcggtcggagggctatagaaaagatcttataaatgctaaggtatacattaaagatatttcacaaatggtttagggtacaatctggttaagaagtcgattagagttgattattataaggcgggagaatattattaacccggaatcgaagaagacaggatatactactatttcctatatagatactctcgaagaaggtctacttccattctatcgaccctactctatcttttagtaagataacactcggatccatactactaaaatcacacaggaatggtttaaaactcacgggatatatatagaggagtagctgccgcactcactagatttaaacccgattgaacctatatagcggtggctaaaggttaaactttttgagttatttcctaagctaatatatataggaaggtctgaggaggattagatagtattcaaaaggtatataaagatagcataggatgctattccgcagtcgaagattgattcattgattttaagtatagggcgcagatatatggcagtacagaaagcaaaggggtattatacaaaatattaaatttaaattttacccgagattggcatagggttcaaccctatttaattcgaagtaaattgagtaaagtatggtagtgctatgcatagatatgtagagatatatatttcaatgttcatgggtgaaaatgcgggtgggaacagacttattaaaccccactgtagtatcgattctagtgcctcgtatttccccgatgcagaatttgcacagcggttcgccaccaacaccgttgttttaccagtcaaataaatgggccttagttgaaccctatattggctagccgaggcactttggcagctgtgacagctacgatgtcttgggttaaagatcgacattgggccgaaaaaggagtcgcatgtgtgtttttctccttttctttctataattccgtctgtcctctataattcattccatagtaaagcgacatagaacagaaaagaacaaacatgaccgtccactacctgagcggcaaagactcggatcttttcaaaccactgacgatctccaatggaaacatcaccctcgaacatcgtgtcgtccatgcgcctctgacccgcaaccgcggagagccattgaatcccaccaacaccccggaccaccccaatcgtatttggatacccggcgatgcaattgtggagtattattcccagcgcgctaccaaaggtggtctgataatctcggaagggatccccccatcgctcgaggtaagtaagcatcggacccgatttgatggcataaaccggattattatgtgattccggcattgcacgcttaatgacattatccaaactttaattccaattatttttaactccgtttccacagagcaatgggatgcccggtgtacccggccttttcaactccgaacaagccgcgggctggaagcgagtcgtggatgccgttcatgcgaaggggggcattatcttttgccagctgtggcacgccggccgggccacgatccctcagatgactgggtcgcccgcagtctgcccgtcggcctctgtgtgggattcgccgacggaatgttattcgcatccgcccgtcggctccacccagcccgtgccctacgccaatcacccgcccatcgcaatgactgtggaacacatcaaacagactatcgaagattattgccttgccgctaagactgctatggatattggcttcgatggcgtcgagatccacggcggaaatggttatcttccggagcagttcttgagctcgaacatcaacaagcgcggggatgcttacggcggtaccccggagaagcgctgtcagtttgtgtttgagttgatggagcaggtggccaagaccattggcgagcagaatctggctattagactgtcgccgtttggaatgttcaatcaagcacgcggagaacagcgtgttgagacttggactcacctatgcgagggtctgaagaagaccctcccgtcgctgtcgtatgtcagctttattgagccggtatgttttgtttgtctctatctaatgacatactgctaacccgcccagcgttttgaacaaatcttcggggccgaagagaaggataagttcctcaaaagctggggcctgctgggcgtgaccctggatcgtttccgccagatctttggctccactccgttcttctccgccggtggatgggatgatcaaaactcctggggagtagtggaatcgggtaaatacgatgcgttgttgtatggtcgatactttaccagcaacccagatctggtgtacagactgaaggaaaagctccccatggctccatatgaccgaactcggttctatggaccatttgaggacaataccttccattacacggattaccctactgtggatcaacattaagtgtttcatagagtaaatatagatgttacctaggcagatagatatgtgaaacttggattttaagcataagaataaccgtggaaattctcagccttcaccccgaaaccgagtctagaccaagcccgaccgtaagcgacctatggtttaaatgaatgtggaattccgggagtcagccctaatgcaagacacggcaatatcggcaacattgtgcctcgtgggaatcatttgtaatacggagtacatcgttatgctcggacattagtgatcgactgccgtgatgaagatcgtccccaaacgggctgcaggctgcagctgcactctaccgaggagactgcaaaaacctgacgggagagaaaatcctaaagttgtctcgacattctctaaatttgggttcggcagagtatcagtcgctgttatattgctcatctcgaattacgagctcaaggcccacttataatgacttgatgcttttggccgggaccatactggcaaagatcacccacttcacccgtgcgccttaactagagggaaacggtttgtattacatactcaccaacggcaaggcacagccaaaaaaggaaaaaaagtgggaagcaagcgataatctggagtttgtatcgcacagcttcccttttagtgctagccgatgccaatagccgacgccaaggcgatggcactatgttgtactatatcttcctacattaagcgaacctgcgggccggatagatgtgaaaatgctgcgggaaaaccccatgagccctgaaaatgccgtatggaattttgggcaggaattcgaactgtaagcgctatgaaaaggataccagtgaatgcgtaaatgcggtacgtagtcaggacttacttatagcggtacccgaagcgccccgaagcgccccgaagcctatccgttgataaagaggctaataatctctccacagtatgcaccagcttgccactatcaaaggttatacatagaaaaggtcggttccaaaaattcaggcttttcccgccttttcccgcctttttccgctgtctagaaaactaagaagacatcgagaattgtttttaagaccaaaaagactagcatataactagccaattgttcttgtatgtgataatgctatcagtaatattttattgggagaaagcaattgggagactggctccacgcactgcttcttgataggagtctgacgtcaattggcgcgcgtaaccgactatcatgtagataacagctacattgaggtgatgtatacacttttgcacacgactacatgattatttgacactagaggcacaatacttcgccaccccaatcagcaatcaacgtacagtcactatatgcaatgaccgtcgcaaacgaggagataggcatttcctgcgaggaactatgatgattgtgagcattgggcgttcctcattcctataaagtttagtagaactctcttttgaaatctctttgacgtcctacaggtctctcttgctcattttgcagagatgcttctcccagtttccagagcaggagggatctttgtctttgtccgcatcaagctatttagaaagcttcatggcagtagttagatcatcattgatgtggatcgaggagaagagcaaacaataaaatgaactgtattatgctaactgagtgtgtgtatatgtgtagacaaaaagaaggagagaaaggaagatatggtagtcctgataaacagggtcaggtgacgtgatcccaataatcaatctataagattgattgattattgttgtcactcttctctgcagacacatatcagattgcgatcagtacaacttacaaaccaagcccgtcttacgataatatgaagtgcactttcttctaatcttccaagctgcaggtctcctatcctaggataaactcatggcgtaagaaaacccctttcacattgtagcatcgactctctttgtttgtactgctagattaaaaggaagaacagacatgctcatattctcactgcagaataagaccaggtcaacaggaccagtatgaaagaaagaagcacctccgtttgatccatctgactttacccatagtaaaccccctcctcaactgggtcaggaatgtcccctggccatctgctattgacgctctccatcgccagctcgatctcatcctcgtcagagaacacaccgtatatgtcgaaaagttgaagctgatcatgaacccagatgcgactatcctcagcaaaattatcaatctcaaatttgtgccggttgttcacaacaatcatgtcgtagatatctcccactgtgtatccggggtgcacgctcagagtcaagatcaattcccgctcgggtggaaccaaggtcgctcgtctttcaaacgaaatgatggctttggagccatcgtcaagaatcgtgctgtcttgtgagaagcttggaccacaattcagtctgatcgccgtcatgttcacttccgatgtcgacagaaaaaaggtccagcgatttgcggaattgggatcgagaggtggcaggcatatggctcgaatgcaatcgagaggctcgttcaggatctcatctcgctccgaaagaggtttgaactcgattgggtcccattccataggaaagtctagttctgttagatctttttgttaacatatatggtgatgggttgacatactctggaagaactcattgatcagcatgttgggtactggccacaagggtagagagagaagggaaaacaattctgaaggcttcagccatggcagagatggctagagagatggtaagacatttcgcgttaaaacaatcatgagaatggtccggaccaccttattcatgctaatttatgttctattctgtctagttgacctctcttattaggtcagccctattctatattcaacctctttctctcttgcacaatattcataacttttatcgtccatgaagacgtatacaacgaaataagcatgcaaaaatctcgatggttccaacttccagaacacatacttggtcgctacttattgtatatagcagaagtggcaggagagatggttgcgaaggggtagagcgaccaaaggtcgcctgaatacttggctatgggccttcatgtgaactaaagttccagaggagaagctagaccagtcgccactcacagaatgaaaaaggaatttataggatgttgttgcattaggaggcaaggatgtctactacggtctgtgtgatccctgtgtttgctagctgactgtcctagatggttggtgttgttgtgtcgctctcgtcttgtctgctaggccagactgcccatcgtgtatatccctcttcaatagtttgataatctattatatgattacgaacgccttctttcacggtaagcctgatgcttgatactatataatttccaggttatttacatagttcgaagataaagggcaaagaaatgtagtattgtccaaatcttattgcaatatattcctaggatgtctgctggcagatcaaggctaacgaattgcctaacaatctcggtgattcgatcaacgggagtccattacagatttggcaatggatcgtaaacaagacggtaacaattcaagatgaaactccttatcgggtgccatcataaggttcgccttaggctagctaggggtgcaaatttcttttggtcggtaaaagagccgaatacatagaagttacagagtataggtacatgtatatgctcctaaggaatggctgttatagaatatcgtttctcatagtcatattaacgcagtctaaacactgctgtcggtgataattatacaggacttagcaaatctactcgtcatcactttcctccccttcaatcccggaaacctcgtcttctgaacaaggttggaaaaccccaggggccaaaattgatggccgcgccttgatatttcgagcacaaactcccagcagaaggtcatcatcatccgaccgactcctcgtagccccgtccagcacgaatttgtattcgtggcccatctcttctacgagggccaacagcatgttgcgcgggagatatctccccgcagttccccagaatagctttccctcctctgcctggaggattgcagccgcctggctggacttcccttggctactatgctgccagcacatgcgtagcatctggacgcagtagtggaagtacaaatatcgagcagcagggcgaaagctcgaacggaacttgagctggcggccgtccagctctccgaatgtgatagggtgatgtcgggagaccttctcatccctcctctcccagtccgggtcaataagcttgactcggtactcccgaggctcacagttgagccaacccttcacggatgctaggacatgcttctgagcttcaggaatatccggtactatagcaaatttgccagcatcgaagtatctttcaagccttctagacagaagaaggccatttcgaggcgaggaaagctcctccggtcgcgtcttaccgaagatagcatccatcgtatcctgcccattcatatatgggaacaggtgggatgcttgtatgttttcttcttcgtcaaaatcacccagaatggggcaccaaatccatggctgcgtagagtggcgggcgtcataagccttgatcatgcctgtccgaaagttggcttgttggctggtgtcgcaattcccattgcctgtgcctttgatggcaatacccatggtagaggtagtgaagagtttcataaaggatgcccttaagctccgacgaggtagcacattctccaactggctaaccctattctcgcagattttccgagtctgcgcctgggcttgaatccgttctaatatcattttggcctcgtctgtcttcttccattcttcttctaagcccccgaaactaccaagtgaaatcttacgatccacttctgacctttccaaattgattctttcaatctttacagcttgactccagagctttaagtcaaatgacccatgtgccctccatggtttccgggctatactcaaattggttgtgagttcgcgctttcttttctttagaatacgtatagtttcaggctcggtctggagggagtccattgattcattcaagaaatccataatgatggctagaatcaagtttgtgtctgcggatttgaagttgcggtttggagattcaggcttggagttcggagattcaggtttggaatttggagattcgggtttgcagcttggagattcaggctgagagcttggagtctcatgtttggagcgcgggaaggtactaagcctagtatagctgtgattgtgtcatgatgatatatggtcccgccgtttcactttatggcagattatattaacgcgctaaattagcgcttctaaataactataagaatgaacccaattctttaaccttcatggccatgcccaataaaggatgccctcaagctgcgaggtgccacattctccaactgaacggcagggtttagatgccattgcgccaactcgaaaaataattagggattgttggctctgactacctacctgccttcaaacagttgatgaagcttgacgatgaagcagttgatgaagcagttgaagcagttgatgaagcagttgatgaagtttgacgatatagttgacgatgaagttcatgagggaagcaattgataatgattcactcatttgctaaaaaggacttaattttgctaggatagtagtatggcagtaggtacctacaatttgtatgtaaaccactaataaaattatgagtaccgtctcatactagtttgacaccaaagcggtgtatagaattgtaaggcagtatcgaaagcggtaactaactagcaggtactatgactgaattttcaggcacaaggctaggccggtttgagaataggtaagaccaaggcggtaaagaaattatatgggttggcgcgatggcatcactcggcagattttcttactgggcatgaatccgttccaatatcatttaatgagtattccacaacttgtttctatccatttttattgaaataattcattctctacatgacctcaattatctacgtttgatgtttccctcttagtgcctcggccacctttctcaataacccattgtttacttttttatacgatattgggtgattagcctaggactctcacatatacttgattttcaatagggtactcggctgaaatactgtgatattgctgcccttcatacatccaagactaattggatattttatttgcctaatattgccaccgtagatacatcgatcaccacctaggaccatgatccatgatctggagttgacttgacctacttcctagttcagcaatccgtgagacctaatctgaacatcctccaaggcttctaatttctaaaatcggtactctccaagagtcttaacttagaatcaccaagatcatgtttcctttgaacgtaatgttgaggctctgctacttgtagataaaaggaagcttttctttgtcttccttgtgtcttctcatgtctcactggagtcgggaaaattccgagaatatcgagtagactatgtaaactcggacaagtaaacaaagaaaaatttacatcgtctctgttgttctgctctccaggatgcacgtgttgttctgcagacgagacgaggcacgttaccatatgatctgtcttcgcagtccttctcagccccggagatcttcttctcctttttcttttccccttctttcaaattgcctgcaatggatctcgttccaagtgcctttgtggcacgtccgttgaagattgtggttatcggtgctgggtaagggcatagtgaactcgcgataattacttctaacaaattgttttagtatttcgggaatccaattcgcacatgatacgagtatatccttgtcaggtgtcgatctcgaaatctatgacagaaatccttctctcggaggtacatggtatgagaatcggtatcccgggtacgattatattcctacgagctttataatcagatgaatgagttcactaattgccggtgatagatgcacatgcgacgtgccttcccacacataccagttcaattgggcgccaaatccatcatggtcgtcgctttatcctccagctcccgagattcaccaatacctcgaggatgtggtcgacaggcacaatctccgccattttatgaccttcaacaccaaatgtgtcttggcgcggtggaacgaagactcctcgaaatggaaagttgttctctgcaacgtggattccggtgaagaaacgaccatatttgctgatgtctttgtctatgctgtcgggcggttgaacaactacaagttccccaagattgcgggccaggaaatctttcaaggagttcaagtacacactgcaaactggccagctgatatgactgtcaaagacaagcgggtgatcgtgattgggaatggtgcaagcgctgttcaatgcgtggcagctttgcagccaggtgagtcgcaaagtccccccgaagacacacacaccacgctaactgggctcaagttgtttcgcaaataatcaacattgcgcgaggcccaacgtggattcttccacatgcattagcagaagatggcatcgtccagcgcgaatgtgagtatgaaagcaaaggacgagcgacagaagggctgatccatatctagactcaaccgaacagaaacaagcgctccaggcttgccctatgcgctactatgactttcgcatcgcattagagcagagacttgccggaactttcatgggactctggagaggaaccagatctcaagctaactttacatcactggcaaattcattcatggagtccaagatcacaagccccgatcttttaaacgcactcctgccagaattcgaagccggctgccgtcgcttcacgcccggtggtcactacctggatgcgttacaaaagccaaatgccgtgtacgtgcgtgactcaatcaataagctgaccgagaatagccttatcactgaatcgggaggagagtacaagtgcgacatattggtatacgccaccggattcgagccctatcagccacggttcccagtcactggccgtgatggacgatcgctgagtgaagactggaatcgtgagggaccgtgcgagagttacatggctgcgatggttgcggagtttcctaacttcttcggtaagaatctgaatgctttttgttgatgactgtgcttaaatatctcggacagtcttcaaccccccaatttgccctgtgaatggatccgccatccccggtatcgagagagcaagcgactacatgattcggatcatatcccgactccagacagacagactgcgatccgtgtctgtgacccagggagctcagcgtgcattcaaccaatgggttcagtcgagaatgcctcacatggtctggtcaggaccgtgcaaatcatggtgtaagtaaatatctctatcccttgttcctagatttgtagatttactcatcttgtgatacagacaagaacgataatggaaaggtggttgttccctggcccggcactgtcctccactactatgcggcaaccgaaattatccgctgggaagacttcgatctagtgtacgagaaccccgatgagaaatatgcgagtttcggcaatggtgtgactgttgatggatttgtgcccgatcatttcccttgggttcatccacccactgagtttcaaaagccggaaaggaatgcggagccaacttctcaggttcttgcaccgcaaagcagtatgttgtatcgagttacaagccagattttacagttgctgggggcatggccgcatcctggtgaaccaccagtcaagagttgaggaatgttactatgctagctagcttttgtgaaaaatccaatatgttttcgggttaaacgatctaagtgtatgcttagtattaaaacctgaattcgtgctacacttctaaataattataaagttacgctaggtctagtcgtataaaatgcatgaattgactctattttatagatcttatatccaatgatctagaccaatcagcatgaaggtggatatatcagtaattccatcggctataacgcctttacgcttgttatccccggcagatgcgcttagattattaatgagctcttgaccgatttatttaaatagtctaaaggagtttcgttctgtttcttctttgttccactaatcataattcattgtgaaacaattggtgagttcccttgtcctgatgatatgacgtcatattcaatgtgatattcaatgcaaaccaacaagaataaataaacaattccaactaatgataatctctgtattagaactcatatacatacgcccgcaatatcacaatggctgataataagatggaatatgtccggtacagacccctgtcccacacattccagtcgaatgagatgctgatatcaaacaaacagcctcggaaactcaggtctcaagatctccaagatcatccttgggacaatgggctatggcagcaagcaatggcaagactgggtccttaatgaggaagactctctgcccctgatcgaacatgcctacaagcagggcatcaacacctgggacacggtaattgaaaacatcagaatatcttcgagaaaaccaccgaataagccactaatattcaccgtgtaggcggacatctactctcacggcaaatccgaggaaatcgtcggcaaagccctgaagaagtacaacatccctcgcaaccgcgtggtaattctaaccaagtgcttcttcggcgttgacgacgagggcaagttcccacccatcgccgcatccggcaaaaacgacggtcccttcgtcaaccgcaccggcttatcgcgcaagcatatcttcgacgccgtcgacgccagcgtggaacgtctaggcacgtacatcgatgtgctgcagatccaccgattggaccgtgatactccgcgcgaggagatcatgaaggcgctgaacgacgttgtcgagagcgggaaggttcggtacatcggtgctagttcggtaagtccatcctaccttccttccttctgttcttattctcccctttcgttccttccgttttatgatccaattgatctccactaacccataacaataacagatggcagcatgggaattccaatccctgcaaaatatcgctgagcgcaacggctggcacaaattcatcagcatgcagaacttccacaacctcctcttccgcgaggaagagcgcgagatgatcccctactgccgagactccggcgtcggcattatcccgtggtcaccgattgcccgtggtgcgctggcgcggccttggggctcgcgctcgacggtgcgcgagaacaccgacggcgcgctgaagatggttgtccgcagtcgcgagtcggaggcggataaggctatcattgatcgggttgaggaacttgctaagaaaaagggcgtgagcatggctcagattgctattgcttggtctttgacgcacccgggtgagaatccgattcttggtctgcatagtgttgagcggattgatgaggcggttgctgctattaaggtccggctgtctccggaggagattaagtatttggaggagccgtatgttcctaaggctgtttctgctcttgagcggtagggatgtgaagggaatatatacggagttttagaaggtctgtaaatactgtgaataccatacaatttagaggcatcttgatattctacaataacagcactgagcttttgatgttgaatggtacctaggcatatagcagttctacgaggcattagacatctcttttatctacgatatacggagtatgcaaagagaaatatcctccgtatatgtcagatctaggcatcaagatattctgtagtacttcggttgtttcggaagtattctccctttctgagatcacatttcggcacccctacggggtaagcatccactcgaacacccactcgaaacatccactggctcagccacacatttccgacaaatcaccctttacgaagtgggaagtatacacctcataagccaccaccttggcaaaggctagctggtattcatcatatttggacaagcgcatgcagatcgcattattattaccttggcgaacgctaattcgatcgagatagtagataacggcgtggcttagcgcccaacacaggatgatccctccccgatcttctctagcgctttatgacctgggagatgcagatggacgttactccgaggacgccggtctcatgtattgtagcaagaggataggctgtaacgaattgacagaaaacagaactaatacatccttaacttgggttcctaatgagattagcaagatattttgagtctatacttaaaatagaaaggcttgtggaattcacagtgagtgatgggtattatattcatatgtagcgtgattggatagatgagtagcaatgtgcacaagtgagataagcatacatattttgacctcatgatatgaagatatgctaagaagtaggtagaaaaagagaagatagagggttacgcaaaaagcaaaggatgctagatgctagttggaatgtgtgtgagagagggagagagggagggagagagggaactagaagaaaaacaaaccggcaaggattcgtaccagacgaaccacactgctacgtatgaacgcccaactgatgccaattgagatgagactcgaaagaggggctatgatgatgtctacatgtagactagccacaaatatgatgcaggggtatagatggtgatgggaaatggaaaggtcaatgagtatcgtgttttcggtggaaaatgccaaagaatgtactcaggcggcggctgagtttgcttttggtcgagtcgacagctccagggagcggagcatccgacttcttcttgcgggtgctattatggtgcatgaggtgggaatttgaggcaggcggatctcgatctggccgcggttttgatcgaacggtttctctttccggctgggctttttcgggggacttcgctctaggataaacagctcgagaagaatcttccacctcagcggacggtgggcgaggagaagggggacgggagacaacgatatcgcggccattctcgccggaggtagtgaacatgctgtgtcggttcagacgagtactcagcccagaagcggatcgtcgtttcgctcgatccatgaatgcagcaccggtggagttggagcgcctggacaaactacctccatccataatttgggaacggcggacactggaaactgacaagcagcgcttgccatcttcagcgacattcgggaaagagtcggtttcattcttggaggtcgtcggggatgcatacttggcggatgtcggagacgtactcgactttgcgggcgaagacaccgggtcactgtagcggaaattgtctgaccacccctcacggaaggcaacccagatgccggtgacgacaatcaaagttcgtagtccatcgtcaagaatgactgagctgccatcgaggggagtctcgtccgaagcatcactcacgaccgacattcctgagcttggagtcgtggggccggtgccagaccgaacagccgtggaatattcattattgacttctaactgatttcgagtcatggacgcgagcacgggatgtcggcgggtggtaggatcgatgacactgaaggtgaagcgcttgccgtcctcgcgcgattgtgtcgctgtgggcatagtcatccggcgattcctcccaccacgcaaagcccaccgcacgacttgcacgccgctatctgtctgagcgacaaactcgtaagacccgcttgggagaggcgcggcctcccagatcggcccgaagttcaagcatatctccgcctttccattcatgcgagcatctccttgatatttttgacagacagtagcgacgacttcgcgatgatcttcgtcctcatcctccgagctgacacgtttctcaggaatgctgtccaccgcccggtcgtattgttcactcaacaccacgatgaggtcatatggacccaatccgtttcttgttcgatagatggctgggaatttgcgggccagtagcgggaggtaagacgtcgatggcagaatgtccacgactggtaggggccgaggggtttgcgacacctgttgtagttgtaggaggagtttaggacggaatctgaatcgcttgtggcgggcatgagcggcggggtgggcgaattgatacaatgttttgggtcgagacttccgacctgtgtttgaacgggcaactcgaggcctggcgaccatggctgattctctggagggttcgcccgagtccgaggctgactcaatcgaatccatcgtcatagcggatacaaggcccggacaatcagtagaaccatcaggcagcctaggagggctgtaaaaggagttcaacaatggtagagcagacagtaagaacgcaggcgagtatgtagtacacgtggaaggcttggcttctggtttcttaggttcattggcatgggcagctgcggcatccgctgtgaggccaagattcaacagcatgtctaagccctagcagagccacattggaatgagagaaccagatctctatggaatttcaccccgatccgatgtactagtcataaacgggccgtattcaaacgcgtcagctgcgggggtgggaagttcagccccggagctatgtgtggggaagggcttatgacgaggtaaaatggaacagatgtagagaccagaatgtgcaagagaaagtatatgcaagggcagttaaaagatttcaagaggaggaatgttactgcaggagcaataaaggacaaaagatgctcagtctgaatggggcggtcagccttatgaagctatgtaagaaaaaaaaaaagaaaaaaagaccgaaaggaactagtcaatagaaatgtcgtagtggaacgccatttagttgcacaaaatcccagaattgaccccccagtgtgtaatttatgtttaataaacaaattataactagtctatatcaaagtactcctccgtactagcagaaatcgcagtacggagtagtttaatgcacaaaaccggaagttcagctcctgtcagcgggctcggtcatatacggcctccgactcaccggattccgtggcgatcatcaatccctacttagtatccagtcaggttctttttggcctaagatcgggatggtctgcccctcttggcaagccccatctcattgaaaaatcggcagattggtccgaggctggttacctcatgagcccatactagggagagctccatatatttttctaggcatggtgggactatcacgttcagaagttgaattttcttggggatgactttgagggatttcatatctacggagtatgaaatccgttgatgacccgttctcaatttaaccttggaatcgggcaaattgttgtggcgcaaagtccgatgaactagcgcttatgctggtagctcagccttgggaataacggaaattcttggcagattgctatttacgatatgtacggagcacgacgggtagctacgtcgtttattgattctgtgttgatcatttgtttcacatatctaaaatgcccgcaagatgaaatttgcgagatgtccccaaatcgccacgggaatagagtccatacctcgctgtgtctagcaggttctcgcaaggacgtctcttttcatcaaaccttgacgcccggtggatcggatgactaattatgcacagttatgcagccgaatatttcagcgtccacctcttgggaaggtcgtaaggttacctcggtagatcggtcgaccacaacccggtgaatcgtgaggtaaacatcccgaaatctagaccgctaggcatcccccattggaagaactcccgaggtctcatttaagtcacccgcttagtggctggggtcactggaaacttcttatggctccagttcaacctaccgcaaggccaccgccgttgtttgccacactgctacgattggacaacccgattcgaagtttgacgctagcattttgggcatggaaggttctgttgtatatcgttgttgttgcctgtccaggatcaggttatgatacctccacctccttgatctcatatgctgccaatccaacggcccagtccgagtctctctccggaccccttaaatttgccagatgggacagtatctacttcctagatattgccgaaaagggatacctgtacgagcaagaatgggcttttggctggggctacactaagcttctgtctatttttgttgcaggtacacaattccatctagcactctagcatcttctcacactaatacaggaaataggtattcgtctctctggcggagatgctggacccgctagcactgccatggtgggagtggttctctcccatgtcgcccattatttgtccgtattggcgctctatcgtctgtcggccaatatctttggccatgcgactgccacccaacacctcatttgtttcctatctgcggctctccacatcatctcgccagcgggcgcttttctttccgcgccctatggagagtcgatagtctcttttctcaacataactggcttttacctctattcatcgtctctcattgccgagcgcaatggggcaactcgtctgcgagatattcgggtcctcacatccgcggttctattcgcggttggcaccatggtccgcagtaatggggttctcagcgggttcctatttgcttatgatgcggcagttctgggctggaagatcttgactaaaggacctacactgcacaccactgttcgacttgcagtggtcattgtcggtggctgtattgtaggatccgggatagtcattcctcaaatcctagcctaccgcatgtactgcatgtccgagggcgatcttcggccatggtgtgagtggactttgcctagcatctacggctgggtccaaaatcattactggtaagcagtaattcgtgtccgaataccaccgtcctcactcttactgactgcaataggaatgtgggattcctgcgatattggaccgtctccaatatacctcttttcctgttggcggcgcccatgttggccattctatgccgatctacgttgtgggcattacaaagtccctcttcctcctcgactagcccgggctcaatgctcgctcgcttggcggttccccagggtttgctggctgtcatggcattcaccagctaccatgtccagatcatcaaccgcatatcgtcagggtatcccttatggtattggtatttggttaccagtgcggtagatctcagttcaagcacacccaagcaaagccggacccttgtagccgctgtgtatagcatggtggcctatgcgttgatccagggtgttcttttcggttctttcctacccccggcatgaaaaagaatgaccagcagggatgacccggctcaatattggcccgagtcacctgctgtatatattgatatgtgatttaagttagaaaacacggcctagactgctttgaatgaccacaaatgccgcctcccgagtgttggttgggcaaaatgcttgcgtaaggtgcctgtctgcctaaacaggggtggaagccgcagtcgcccaccaactgaactattataaattggaaaggaagaggggaaagaaacgaatctcacgcatcttttcaaacaactatcaaaaacaagtcctactatatctttagtgtatctttccacgcggctcactctgcagggcccaagcttcgttacgtataattatgtcatcacaacctcgactctctcccgtttgacctcttgaccttcaccatttaggcatctcaagaagaagagaagaatcggaggccgaaatcttgagctgctcaattaccaaaagaaatacgagcccgtcatatttcccctcgcttgccaagagaaaaagtaccccatgcgaacacagccgtgtgaaatacaatagtattcggttccaaatcccgcgcttttcggagtagcagcttcagagtttcattaaaagtacgatttccttcgaaacttcttctattattgatagggcgccggaaaaaaagatacccttgtgaaatatcgacgttgctgacgtattgcttgcttctagagctcacccgacagcaacggcaactcttccctgacctccatacccacctcgtgtcgaccattcccttccctatcccccatccgacgatggaagcctctgttcacaaggcggttctcacatccgacaatttccatcatgcacaagagctctcccgggcgacctcgcccggtggtgagcccgtcgccgtgaatagcgaaggcgaaccgatagcccgcgtgcgcccccgtacctatccatacttcaaatacctcccataccacctcgaggatgagagtgagcggaatcaaaatctgcgagagattttgaaccagctctatattgcagtggaggccggtgacttcaatcccggagccgtgcactggacacgcgagctacgcggatggctgtcgctcaagttcgatccaaccaaggcgcagcgaatcagccttgtaaaattgtattttgagcttgcgcttgctcctgggattgacccgtcggtcgctgagcggtttgcgagcatgttcatgcttctcacgaagtgagatgggttctcagtgttagttgcgaaagtaatgcggctgctaacacatcatttaggcgcaagcattatctcaaaccagtccaagatctcgtcttagattggaagcctctatacaaggagctcaaggctttcgtcctccccaccgagtccggcctcgttcactcgaccaacttgaagcgcaatgttaagaccttgaccaagctttgcgcatttgctcaattattcattgacccgtgtgagctccccgctatgcttgaggagttcttacctcattataccacatcattctcagaaggtgccttcgttgtcgccgggctcattaatttgttgctcccgacatccccggctcccgaatcgcgagtcgatctcctaccgcagagctatctgcctacacatttccatctgtggtcattggtcggtcggtcaaaaacatttgacacaacatatctggactatctttcccgattggccagagattctctgccggctgctcacattccattctccgagcatggtatcttcacaaaggaacagtccgctctccttttcactgcgatattgaggttgttggagatccccgtcgggcaatccacttccccgtacagtgccttggtggatatttcgtctggtttgggtatcatgcttgatcgagatgggcggaagcaccctgttgctcatcatattgcccggtggattgtgatgtcgctttcacccgcttgtgtagatgccgaggtttcagttctcacacagctggaaggtctaatccaagctgtcgagacgttcttccacccttcaaactcaggtcattggactaagaccctgtcccaactggtttattacctgactgatttcttcgtcatgcgttggaatcgcgaacaaagtggtgagctggaagtcccgcctgagcgacgattgaatgaggctctgaagaagcggtttgtcttgtgcatccgtgacgtagtcttcatgggcatatatgctaagagcggcactgcaattaccttctccctgtcaaccttgcaaggtctggcctacttagaaccgcatctcatcctacccggtgctttgcagagaatctaccctgcgattcaaggtcttgtcgaagtacaccggactgcatcttctcttcgggctatgacatcgctgtctcgtgtcatttcgcgtaccaagggttatcgttgtcatatgacaactttgttgggtctaacactacctggaattgacgcgaatgatcttgaaaaatcgcttcatgctctatcattcatccaatcggcctgttacaatattccaatggtcgacttgacccaagggcgagaggatatcaactgcaacatgcttgccatgcaatggatctcaggtgaaatggagaggatggaagagcaagggtccgatgtacagcttggttatgatacagagttagatgacgagaccgaggaattgatcttgcgctcttcgacatgtggtttcggagacttcacgatagctttcctaggtcgtgtcttcacactcttggagaatctgccggacgtatccagggttcgaaacggttcacccgaagagaatatcgtgaacactcttcccgccacgttcatgcctttgctcgcttctctctctccggagtattacgatatcgccttggggaagattgtggatttcgtgtccaaccatgtcatccaccaggctcgtgatgcaatggctttcatctgcaacgccctatgcaaagtcaacccagagaaggccctcaagcgtttcatccctgtcttgacttcagctatccgcactgagatcgaagataatggtgctggatcaacccgaaccacaggaacagatgttttgcctcgtgatcgaagtctggtatggaatgtcagtatgctgagcatgtgcgtggtgcatgttggcagcgccgtcattactcaccgccaagaactgtttgacattgcagtctatatgcaacagaactgccgtggcattcctacagttcatatttccaacttcattcaccaccttttgctcaacctgactgggacttatactaatgatttctcactctacgagccttcagtcaaagcgaacggcatcgagccgaagctctggagttaccaagccgatgtgaacaacctcaccatcaattggcatgtgccgacgcaccaggaaattgagtttgctgtcgacgtgttcaaaatccaaacagaaacggctttgaagtccctatctgcgctgactcatgagacatcaaccgttaagcgtgatggaagcggcaaggactggtcagacgaggtcactcgcaacctcgtactcctgcggctcgtgttatctggagtttctgtcctctttgatcccaaagccgcatcaaccacaacacaaggaccctcgaacggtacctccggggatgtcgagatgaaggatgattcgggtgtttctaatgaccatgagaatgatgaagatgctgtcctggacagctctgatgatgctataatcagacaggctttcacatatccaactgggtacgccctcaaagagggagacccattatacactaccatccatgaactccgtgaacgaactggctgggtgttgcatgatgtacaccggttcttgagcgataagcaagaggatgatgttccttgctttggcgctttgtactctgcctttagatcgtggtttgttgatgtgggcattgaaaggtccgctcatgtactcgatcgagtgactcgcctcttagccgcggacattcatccttacaagatgagtggtatgcgaaaagattaccccagacccttgcttgtgcgcagagccaacgtgtatcacctccaacgcctacgacacaacgcttctccccgtccgcgatctaagcttgatgaaattcttcttcttgatattgccgaatcttgtgtctcgctctacacagaaacgcgccgcaatgctcaaaacgcaggcgaatcggcactaaaagcggtctatggcggcagactactcgtcattcctcctctgctcacggctctgcagaggggtgtcaaggaaaatgatcatgcacgcattaagggagcactctactcgctacttctgagcagtgttgccaagactgtcgggcggcattggaagtatgcgcctgccgtggtcagaacatttattgatgccagcgccgttgataagccttctgtccagaagatttgctctaccgcagtcttccaggtcatggattacggtcgcgcgatggagcgaatggctatcctagatcaagagattgtagaggcaattgctcctattgaagatgtcagcgagcagatcgagaaaaagcgcgcagttgtcaacagcaagcgtgttgctatcgagaagaagaaagccgacctttccgaagagctggtcaacctggcgcgggtgtcccattggaagattgccagtcgcgctgcaactatcgttatcactatgggtctccgctttgactatatcgccagcgataacttgatcgaactgatgacactcgggtctattgacgaccaccctggcttgcgaggcatgtactcccaggctctcatagcgctgttcacgatgattgatgtgcgggccatctgcacgcacgagtacaagaactatattcttggccatcagcgtttcccgtccaagatcaaggttgcaacaaaaccctttgagaaaggatacactgaacaatacctttctagctttgcaaagcctgaggcagagtactacgttgatcacgacttcccgggctggcttgtgtggggcaagactatgccggcttacaagtccaatgtagcacgggatatcgagtatgacgatgttgaatggaaggttcgcaccaagatgggcaagttgtttactcgcgagtggttctccaaattcttcatgtacttgaagcaagagccacgggacccatctgctgacaagttccgcatgtcctgtgctatgatgcttctctacgcattcgagctcatgatccgagatggacttacagtcgtctcgtttgaggaaatccaagaggagattaaggacgtctttggagacggcagtgataagcaccaacatcgtgccacggctgaaatcctcggagctttgatatcttcggtgacggatacaggcgtggagaagcggactatggtctgggaatatgcattccctattgtacgaaaggttttcaccgatggccttactccagagaactctggctattggacaacattccttcacatgatccttcaatgtcgtgatcctcgccgcgcttggccgttggtcgattggttgtccagcttccgtcttgatatgtcgaccaacgcagcattcaaggaaagctctaagatcaacctcctgcatcaatgtatcattgattccggttggcactaccagctcgaaaagcccattgtgaaggatttccttgcgcatttggaccacccgtacaagggcgtccgtgaggcaatgggtcaaactcttgcaacgatttatcgcacgagataccacgagtcgtaccctgatgttcagcatcttctcgaggcccagaaatcatcctcttctgttggcgcatacccctatccgcctactaaagactttaccaaggtgattcatggggttttcagtcgaatcgaggaatggcggaaggccagagctcctggccaacagacaccctcatcctacacctcgggtagcaaaactgttcttctttggttggactcgaccttgtcttctcatgagtgtacccagcttgtcccatttttccctgatgtcttcaccgcgcagctcctgcacatgatggatgtgaaggaggacccagagcttcaatccctcgcataccacgttttccgtcacctccctaacattccgtaccctgcggagaaaaactccgaattcgttcaatctctcatccgcatcggacagtcatccccgtcatggcaccagcgcctgcgtattatgatcaacatccaaatcatctacttccgccgcctgttcctgctcgaccccgcagaccgcgacaagctcttcgagtgtatcgcctccatgctcgaagacccccagcacgaagtccgtgctggcgcctcggccacattatccggcatggttcgatgctcgcccgtcttcctgcgggaaaagatggtcagtcgcttccatgaacgcttcacgaagcttctggcagacaaccccctccctaagaaaccgaagaacttccgctctggaatcgcctcctccgccgtctcatccggcgctggaactcccacccccgagcacaaccgcttgattatcattcgccatggtgctgtgctgggtcttggcgctttgatccaggccttcccttacaacagtcctccgcctcactggatgcccgaggcactgactacgctaagtatccgcgcggccaacgatcccggcatcgttggttcgagcgtgaagtcgattatcagcgagtttaagaagactagacaggatacttggcatattgatgcaaaggttcgtacttatgatataggttcaatcctcgaagcaaacggctaacgattttcaatataggctttcacctcggatcagctagaggacttgtcaggtgttctatggaagagctactttgcgtaaatggaacttgggtatttaattttcgtgggtttctttggattggcggcgggtttcctaatgacaatgtgattaatggccgttcgtacatattccaagctctctgatagggtggtgtatctttagtacggaaatgaaagacttgtgctatgcttatttgctctttgtatagatactctgggtgacctattgtgtataaaggctataattcaccgtgatacgcgtcttttctaataagcccaagaattgagtgtgacaagtgaaagaacaagccaagcaatgcttcatattcaacgagcagccatatcaggaaatgagagtgacatccgctcctcaatgtgagactttggaagttctcctaggatgttggtccctttcaatggtatatggtatagctccgagacctaatactatttacgaaggacttgtatctcccacggcgtgatacattgtatgacaatcacacaggtcatatattagcgacatgattattccaagagatatccaacatatagctattaggcttgtacaacttcagacagaatactattgtgtctatctatcacgttggattctagtgtggcattacccaaatcttaatcgaagatgcagtcaacaccgcgtagtgatgacatcgtaggaccaaacccttccagtcattacggtcaaacagatccgttggttcctttcactgatatatgcttgttcatacagtctgattgctcacctctgcacttccctttccatcttaccacgcacaccacgcacatcccgtggctttcagagccaaagaatgcaattatccgccctgtaacttgactgccactcattatgaaactcctcaagagaaacaggacgccatctccgttttacattaagtcttctgtctctccacgggatcgccggtggatctggttgcgctggctggggtatcttacctgtctggtcgccgttgtccaaactagctcatatctcttcgggtacccggagacaaacataatccagactgtctatgcttcgttacagggccccggggtccttcggcctggtcagtatcatgggaatgttggtttgtgggacaagatagcaggcgaccactcacctgagccagatgcgttcggcatggcacatgatcggaggtttgtacctatcccaagcagcttatgcgtgagttgatacaagattatgctaacaatcaacccttgcagagacaagcgattctatcagggcggtaccctaaccctaactagtatcgagtctgtcaacgcctcgcacccagtcccacttgtctacgatccatacccagcatacaacagccgagaatggaagaagcgattctatggaaggttccagccctgccttggccccaggggccgtaatctcaaccggaggtctgcagaagatatgatgcaagtctacaagggtcaacaagccgggttcccagcagcgcgattcggatcgtacgaggcattgggcctagacgaaaatgtttgcacagaccgttactcccgctacggggcatatggttacgatgacgatggcgaggacgagataccgggcttcacgcgccctccctcaattccgtggtgcgaggttgattggcacagactgcaaaacctctgtctagaaagaaacgcagacagatacgagtccattgcgaccgccaattcttcaaatcagagtccactagcctttgaccttccccaggattctctcaaatcacgggagtcacctgcaggtgcttcgggtgtgaagcagtaccatcctcgctcggctgtgctgattcgggcttggaatgggctcaattggaagcctcaccatcgtgaataccttcgggccttgattatggaactttctctgcattctggtggggaatatcagatctatctactgtgtcatgtcaaggaggacgagatgcccattttctctgacatcaagaccatcaaccggctccggaatgccatcccgaaggaatttcggaatatggctctgttcttcaataacaaactcttagaggcttggtatcccaagatcgaagagcacaggtgaattaatcatttcccattgaccgatgttaaagacacccttactaacagcacttacagtccccaactccaacaccaccaacctctgcaaatattctcccagctgtacccacacttcgactactactggcagctagaaatggatggtcgccacacaggacacatctaccaattcctagacaaagcagtttcattcgcacgccaacaaccccgcaaatacctctgggaacgcaacgcctacttctacacccccggcgcacacggcaactggagcgaattcaaacaaatggtacacgacagcctatctgacaggtccaaccttacaatctggggcccagtatccggcaccgggatcagaccaatgggtccagtcccaccagtgccatccccagactatgacaattacacctggggtgtcggcgaagaagcagacttcataaccttcctgccaacattcaacccgcaaggcacgcaatggacattccccgacaaggtctggaacttcagatacggccagtacacgccgcgccgcgccgcggtcatcaccatgggccggtactccaagcgtctactcgatctgattcacaacgcgcaggcgacgaagggtctcggacttgcgtcggaaatgacaggtgtgtcatgggctctgttccacggcctcaaggctgtgcatgttcctcaccctatctatgcggatggccagtggacgccgaaagaactcgcgcgcatctacaaccccggtccaccggagaatgttaatggggctccggatagtatctggaatttcgatcatatgtttgaccatatcatgtaccggctgtcgtatatgtttacgacgcatagtgcggaagatttgtacaggcgttggctggggtacaggactgcggagcacgagggcgggaaaacagtgagtatatatattcgtctgctgttttgcttctttggaattagggagtgatttactgactcgtcttttctagatatccgaggatcgctacggtcgacattgtttcccgtctatgtttcttcatacgatcaagaacacggctccacaaatgggcccagacagggctgttccatgattcatatccatttacggtggttgacttgttgacatctcaaaattcttatgctttgacttatcggcgttgatgtagaaggcacatacgacttgcttcactgtctaatttagagaatctgaagtcatttgatatcatttgcaaattaaggaatcgcccattgttgcagttaccagactacgaagagatatctgccagggtagataatggttgcgccatgttaaacaaatcgtagaattgcactaaaaccgaactcttcatcgctgtatacaaaaaaggagaagcagtaaaggccaccaaaacaggccacgacgcaaaaaattaggcaacttatgtacgtgactggaataagctgatgaaccaaaagcaatttaccgttcatatgctctgtgagttttgataatccccgtcccaaaaatgaaagtagtccatctcatgacatcattaagaaccccggggggatgcctcttcgtctctatcccctggaattatacttctcgttgaaagcattgaccgctggaaagggtatttggttagcaaatgacattgtttagcatgatcagagtaactacttaccgacagcaatctgtctatagagccagttccgcgagctttcatcttggacaggaatgaaaggtccgttggcaccacccttgagcgtgatactcattcccgtgcgctccttggaaatggtctggatatccgtgaggcggatatcccactcagtatacagcttcttcgtgcgcaccagcatgatacgtgcgtacgtcaacaagaccagcatgtctcggccaggcagctctaggtgggcaatgtagtcttcgtcgaagtatttgccgtcgtccgtggtcttcagccagaactgtccgagagcttcgcgctgcgagtacgggcgcacaatgccatcggtgccaataaagcgggtgagtcgaacacggtcgagaccttcagcatcgaaaacagtagtggtgttgcgaacaccttctgccaaatctagtaggggattgttagtgatgaatactagagaaaggggatggttcaacttactagaggcaagatcgaatgcaccgatcgctggcttggtagccaatccaaggacaccctttccaacacctttgaagaatccttggataccttctttctccgcaccttgcagtggatgacgtgccaagccaccgataccgcttgcaagactagttgcaaaggcactgccaccagccgtgattccatacagcgcgtgcttggggcggttgcgcaccttggacattcggcgctggttttggaactccttatcaagtgtagcggcggcgagacccttggacatacttcccgtaagcttggccatactgtccgagaatccgaagatggacttcttcatgaagctggtagcaccctttgcgataccaagacccagctcttggggacggtcggtcatgaccaaaccctgatatggctcatagaagatagcggcgacaccagagctgacattgttgaacaaaccgacagggttgcctaggaagtcggccgaaccgagaatgatatggatctggcccaggaattcttgggtatagtgtgcacggatattggcgaccaggctggggaaagagacacgggcattctcgagcatcagagcattgagtcggactggtgcatcattgacattacccatcgacattgtcatgacgttgacaaagaacatcaacgggttggagggctgcatagtatcttccacattgacgcgctcggtgcgcatgaatgaaatatccatctgcattggctggagatgcaggagctcgaagtacacatcctgaccattgtcttcttgtcgcggctctggaatgttgaggtcttcatcgcacagtttgccctcttgctcctcggcccacgaagcacccggaatcttgacaaagtcaagcatggcaaggacgaagtcctcatccagttcaagtgtcatttgctgcaatagcaaggtcgcgtacttgatatacagaacaccatacgagtcgtccttaacccgtgtaaccattgcatggaagatcgggtgtgcttccatctccttgccagtcttcggaacgacactggggtaaagcaagatggggaaaataccaccgtagagctggttgtcgatctggatccatttgatagttgcgttcagagtctggtacaacctcgattccctgaacttgaactcaatctcgcggaatgtgagatacagcagctctttcaggttctggttgatcaatgaaattccaatgccacctaggcgaagttgggccttgaagttgacgtccgaattcatttccttgatctcgaacccagccgtggagccgacctgggaggattgtctactttgttgcttgtacatactcttcgacggtttgaagttggatagcacaagagtctgggtggggccatcagcagcaatgttgatgtcaatgatcttctggtgttcgccaggctgcgaagctggaatccgcattgggatcaggtttcctatctcggcaagtttgatatggcgctctttgccctggcaggtcaacacgagcgacttgttcttcgtcgccgggtagtcccatgcatacggcatgatgctccgcgcgggaatccgataccggatcggcctccagccgctagtctggtcttcttcatcatcatcttccacatttggattggcttggtagaaaatgaactccatatcgctttcgttacgcatggagaacggccaattgcgttgctcaaggctgaagtgcaagaaaagagttgctccttccatgatgatatcaatcttgatcaacttctgccgctggttcgccttggccaatttcacgtgcacggttcccacatcggcgatgttgaacggggaagaccattggttgttgacgcccgggaagcagaggcacagctgtttctcttgaacttgacgaaggaaatgaagcggtaccaactgcccgtttttgacctggagtacgttggaggagcctggctcgcgagccagaagatcttcgttgagcttgctctttaggatgaaccgtggagcaagagtgaccaccttggtcatcttgtacttgccctcgccttcagcaacagacactccggagtggaactcagatcggccttggcgatctgggaagatgacctcaaaggtactaccaatagcctcgaaactctgcggcttactccatgcagaatcgctgaccttcaagatagatcggttgctttggtcctcgttggcataagagtacatgtatggaagtgcgcggccctcgtctcttggatcggctctgagtccttgaccagcggcatttctcgcagattggaggaatgctttgctttgaatgtccataggaaggccagtcttgttcaagacaaggtatgggctgtacacagaaaccttgaaagcaccaccactgttaggaatgttgaagtaatgaagctgtagcctcagttgaagacctcgctcatccttaagagtcaaggtatgctctctgcggtagtcttgggcattgccgttgacaatagcaaactcgctctggcggaagaccgaatcttgcagatcaatgctgagcaacagcaagtgggaaagctccacgacgtgaaccgggctgacgccacccttcctcaagaagttcgtccaatccttcttggtgttcttgtcgtagatgcggtacttgaaatcgtagggcaacaggttctgaatctccacgggagcgaagattcggatcctcatgtagggatacacgctcgtaagcgaatccttgctatcaaacgttgcgttgacttggaaatagaaaggaggagcctgctgtccattttcgctaatgcacttaaccgtgcgtgtaggtcgcttgatgaggtccttccagaacaatcgctcatctgaccagtcatatccgaagccctgatcgggacgaacaacgatagaatggagatatgctgatccaacgggtgccggtcgtgcgtccccaggcaaaatcttctcaatcttcagcaagtggccttctccggggctgaaaatgcccatttccacgggaatttgggtattgttctcgataagaagtggcgaacggaatgtgatgtacttgacattatcgggtcccagtttgacttccacgagtagccggtgaagaacactttgttgcttcggcttcagagcgtagataacctcgccctcacgcacgacaggaatgcggctgatactatcgaagccactgccttccagtttgacaccaaccactccgccgtggccttctggggtcagcgattcacggatagcggtggaatcttcaaatcgccatggggcttcttcgccgtcggtaagtttcgccgccgggccttccactccttcgctgacatcggcccaaacactgaggtcaaacccagtgtagttgcggattctgtatggggcatcagcgcctcttggcttggcgaggacatcctgatcagtagaaaggaactggaaggatttggatgcgagtgcaatcgtggcggatgttatagtaagctccattgtcttgtgcgaatacacatcgaaagagaaaacatccgggttggtctccttggccatgtggaatcctagctgccagggctcaatcaacggctcccaggccgacttcgagaagttatacacattcatgaacgtttcgaagttggtatcggcattcagtgtcgatgaccagtcgcgtacatcgatgttgaatttcttgacgctccaatcgaccaaaggtagatcgtgtagatcaccaataagaatgactctaactccgtcgatcttggcagacatctcttcgcgcttgaggacaactgaactttgtggcgcagttgtccgatccaggtttccagctccttgactcgggcggttggatctcttaacaacggcagaggatgtcttgctagaagaacgccctctggttgtcttcgtgtccgtaattttcttcgcctctccgctctcagtctgctgggcattctgggtcatttcagaggccttgttgacaatctggattgccatcagaatatcacgcagagacaagcgaagaaccaaaggctcaaggtgcacctcaatggaggtcaaagcagatcccttatcttgcgatcggctatcaatggacatttcaagagtgaaatcatccagaatgcggagtcgagacgtctcaaacttatccatgcggcacaggaacatgcccactttttgaatctgcagagtcgacacattttggtgggagatgagaacttccttggtaccaaggacgatagcttcagagtgaggaatggcagggttggccaccataatcacctgagcgtcgacaagattgacccggaatgaaacggtcatagccgctgctgtggcatcgcccgaagaagcctcggttatagccttgttggaacttacaatagtatcggaccctgactcagactcctcgggtgattcgctctcatcctgcacctctattggtccttcagaggcaaatgcagactggctgaatgactgtaaagcagacagataatctaaagcaaacataatgcgagggctatcaatagtcagcatcgcaatgaggtgcttctctggtcctccagacatggacacgctagccatgaactgctgttggacatcgttgttgatcaaagacatgatgtttctaaacttgttcgagtcctgcttgcgactatcgcggatggagaatgaatgaatgaggagctccgactccaatgagccatctgtcaacatacgcagcttgactcgagtatcattgagagagaacttggacagactggagtcctctaggcggccgacgggctggtcgtcgtttgccaggataagctccaggccgacactgtcgaccttaaagatcatatcaagtcgtacccaagtctctctgttttcgtcatcagggggtgctcctcccgagccattttgtgcttggacggcctttgaactagcctccctagtaggttcagtcaccgacgagggcaacgactccatagcctcgagctcttgctgttcggtatctgtggcaaacgcgttcggtatcgactttgacagttccagcaagaacttgagctggctctgggagatacggaggttaattggagatagagaaccctcgatttccatatctgggcgtgggttgtttgcttgatgctccaaatagcagatgctgaactccaagttcaccttctgaatcatctccagctcctcggatgtaccatcttcgaaatggaagttggatgtcaggcgaatattgcggacaccagtcgagatgacgttgacagcagggctgtcctttccatcatccatagggacaaattcattcttagcataaatttcaccgaggtgagcggtgattgtgtctcgagggcgaccgtccgtcataacgcgagggaaaactacaatgggcgtcttcacaataatgtcaagccgcacacgtgaagcattctcctggagctggttggcctggctggcagcggcttggcgagctgcattgaaaatggcttgcatcttgccaaacttgacgaggaagtggatgatcttccggtagggctcctctagaaaattgatcttgatcgaaccagatcgcagatagacctcggaatcataaccggggtgtgtctcactatcgggatcgaatgtctcgtacttgaagtccgcgaaatcatctccttctatggtcagaaggcgtcggatatcagagtcctccgcggcacccaggttgacatcgtcgaccaaagtcagacttcctatccgagactggatgagcatcgagctgcccacgaggaaaaccccgacgtcggcagtgttcaaactcaaagttgccaagcggactccatcattgttgaggatgagagcaatactcttgaggttagccttgatgcggattttcccagcttgctcgggcttctcttccacactggcggtcccttcaatagccttgtctgtttctgggttgggttgagtcggttgttgaggatttgtgaatgtaaggagggtgaagtctagaagcgtgagaagtgtttttcttgtcacgacaagattgatagtggagactgatatgtcaaggttcatggcaaccccttcatacgttgagtcaaactcaggggactcgggtttaacccgtaccatcttcagttggaacaggtccttgtcttcgtcggcatcaaagcctttagaggagatgattctcttgaattcaggaaccggattctcctcgatgtgatcatccacgcttaaagacttcagaataacctcagcgaccatgtcataggggcgcatgtaaaagtccagttcaaatccttcggcaaccagttcaaccagcaactgatcccgttgcgggtcatgggggtcagaacgggagagtgatccacgtagacggccaacagtgaatttgaattcgaagtctcggcgatggatattggccggtgtatcgacacgcttctttgcatgttcgctgtctacttcatcctcatcgtcgtcaacaacagggaggtcacgttggactgctggttggaaggatgatgacctgtctcgtgtggctagggctgcttcttccttggctgctgcagtaactgaatcagaggcagacttttccgtatcgaattccgggattgcaatatcaatcaatttcatcaagcccttgtatttggtgtctgatattgatgcgtgaagctctggcagatgtccggagatgcgcgttcgggtaagctgtgtcacgctcggtacgatacacatctccagggcaaagtcgacattgatacggtcgatgatgtggaaattcctagattcgacattcgtgttgagctgcgctttggttgcatcgacgccaggtccgatgaggacttgggtggagtccagtttgatgaggaagcgatcgtacatcagatgctccagttgcttgtaatcatcctccgcatattgttttttctgcttggactgaatttctcgcatcgctttgcggtcgaccaattcgctgttgacactggcatgaccggcgtcgataatcaaacaaagtgaacttggttgtgtgatgctttctggtacaataatcaaaggcgcgtggatatcgaattgcgcatcaaccttcttgtgttcttgcaaggcaaactcgaggccggcccgggtttgctgccgcagtccttcaaccgtggcacccgcggtatctaagagagcaccaatcgactccatgtgtcgctcgggcggctcaaagaacttcacaattcctacgaggaatcgagggttgtaaatgacctcaatactcttcagcttgacctttaccgccgtatctgcatcgctgtcgagcgggttcttctccagttgcagatggaacaaactgtcctcatcctgaagatcgtctgcgctagtttgggaggcgagctcatcatcatcctcgcttagctcttcaacctttgtagattcagggggagaatccttgaccttgacgatctggggataaagagtcccggcagtagtgccatcatacatcttcagccctccaaggtccagatcaaggagataagaatcatggcgttgaagtgccttggctcggaaattgtcaaacactagcttcatgacctcattggctgacccgtgagggtcctggattaacgtaaagctaccagctcgaagactccaattgacctgaagtttgacccattcccggggcacatccacactctcggtgatagccttcttttcatcccaatcgatggcattatacaactcttgtcgctgttcttcagtcatagcagtctcctcggactcttctttcttagcgccccagagccaggcagaccatgattgttgttctgcgggctttttgaccccgacattttcttttcgtagctggttccgtgcaagtgagcgccagaatcggatatcttcgtagctcagttttgcttccagtctctgcagttccttggtttcttcgggcgtaaaagcctcttccttcttcgattttttgaacaaggcaatgtacgcgatgcggtcatctctgcgctccttgatatagtcccaggtccagcgcctgtttcgttcgtggatcttgctcagaacggcttctcctgcgaacctcatccatgcccgagggtcttcctttggtgaggccttaggctggattttcttatgttcctgatggcgaatgaaataatggaatagatcgaccagcatcaacgcgtcgcgatattgtttctcatcaagaacaaagccgagctcatcgaagagcaaccgtgctttgattgcgggccgttcatatgtgcctgacttgtccatttccagaccagcacggccactgacggggcgcaacatgaattggtttccttcgtcggcatcaattgcagttctcagtttctctatcagatcagcgcggctgattccctgggcctctgcgcctatatccgagcctcgcccggttcccagcaatttggcatcagtattccaataagccgaaagagcaccgaggacggccaatttatgcgtgacacttgagtcggattggatgaaagtcggattccattccccgtctgtgctgacggcactcagttccttgagtgtcacgccgacagcaaacggatgcccaggtgatgcgatagagtcttcgtagcggaaatgcacattcttgatagaaatctgcaggttgtccaccacggccgtgatcatgctctgtgtgaagctctgattccggcgctgttcctcttggctcatgccttccgcattgcgctcgcgtagaatctcggcgctctcgacccgttccatcttcagcgcattctctctctttgcttcctcttctgggtcaaagtccgcatcttctctgggtgccgcgagcaggaagacatcttgaatatcgactttcaccggtttgcctcgtaggtttgaccatgggattgatagtgtaagctctccgagatggccttcgacgacgtttagagggaggcgtagctgatcgagcgcttcgcggcgtagttcaaggttccgtagcttgacgtcgcctgaccagattccgatgttgagctgggtcgcatcgaagttcttgacgtaaattcccaggaaccgattcagtaggttcgctactactccctccaacatgattgcggcgtggagccgttgaccgggcctggtggtcggactctatggccggtgcgggtgtcagcaggtggggattccacgatagtctgtaattgaagggatttcgcaagtcagtggcgatccaagtgagaggaaacaagggagcctcttcattaaatggactcttacgcgatagaagggttgcttttatgaaccctggctgatagggaacatccaagccatccaactgagagcacgcgcgatactgaggtgggacctttttcccctccaagcagagcggaaatcggtgaagatatgactagatgtcagattaagaagggatgtagagaaatcacaagcgctaattgagacaaaatgatgttgggtattccagcccaagttcaggcaagttaatggccctgattgcgtggatcaaaagaggtgatatctgttacgcaaattgtatgatcgaggtactcgatacaaacggggtacagcttcttacgccaggggcgggtatcattcccgcctaccaccaagtatttgcaaggtacagagtactcaagccacgatacacttggcactacgtgggaagttggggggccagtggtaagtattttggttacttttgttatcaaagccgtttacgcacgaggcaatgaccctgagaatccctgcaatatactgtaccgtatgtactggtggatacacttgtttaccccaggagtgacgtagccaccctggttagggcagcagccccccgaatttgattggctggggaagggacattatgcctgaggcaactttatcgacacctgaggccaaagcttctgcatcgagttgcaatctgcacttccggtcgctgcggtccgccctaaagcacaccacacctcatcactcggtcacttcatttctggatattcttatttgttccctcccggaaagcccacgccgtcgactttctgatcaaagtctttttccgggtgtataccctcaatctccactcttctacttctgtccagcttttctttcaggccaattgggtgagtaaacactgctgtccggccgtacccgaggcttttctcctccaacttgctaacccgacgacaacgaaaagctctatatctccccgccatgtaccgcaacgccgccgcccgctccgcgctccgcgcattctcgagctccaatgcctccgtggctcgctccgctctgagcaagcagatctgcaaggcccagatgacctcgtcggcccgcagtctgctccgtccctccgtctcgtgcttcgcgctcgccgcccacaagcccgtcaccaccgctcttgtgcgctactcgtcttctgcggctaaggtgagatacggcatacgtcttgtgatttgtggtttgcaaaagacactcaatggctaatgtcgatacaataggagcacgatgatgatgatgttgatgttatggcgggtatgaagtccgaggctgtacgtatttccattcgatgtggatctgggtctgcatatgctaactgtgcctcgccgatatagaaagttatcaaggaaaccttcagcttgagtgaggtccccaaggaggccctctacctcggtatggccggtgtcgtcccctacctggccacctctctgcagaccgtcttcctctcctacgagatcaaccgcgctgctgctgttggcgaaggtctgatcttctctggcgagagtgctgagctgatgctgcacatgctcgagcccgtccagatcggatacggtgccgtcgtgagtgatcccgagtgtcttgagtaatcggttagaagtttgctaatcgccgttatggttagatcctttctttcctcggcgccatccactggggtcttgaatgggctggctacggcggtaagttcggttaccgccgctacgccgccggtgtgatcgcccccgctgtggcctggcctactctgctgctccccgtcgagtacgctctgatcagccagttcctcgctttcaccttcctgtactacaacgatgcgcgtgcttccgccgccggccgagctcctcactggtacggcatgtaccgtttcgtgctgaccttcgtcgtcggtgcctcgatcgtggctaccctgatcggccgtgagcagatccagcagaccaccgcctccgagcacagcatcaaggacaagatcaacgctctgatcttcttgcagaagaaggagaaggaggaggctgcggcccgccgtcttcaggcactcgaggtcgaggattccgagtaaatatgccttttaaggtgaggggcatccccccgagactgatctcgatgtttgcattaccgtgatttcctgtagaatatacgcagaacgaacgcactaggccactgaaatttcttttgttcaattgaagtgtcgtagttgggacccaagtattctcgagtaagagtcttatcgtgagggatttgacattccgcatcgagtgggggtagatataagcgtacgggtagcaggatataggtatccatgggatgctcccgcattataatttcatttcttttttcttttttcttttctcaaacggattcaataaagctacactcgtgcttggcatcaaatctgagttagagctgcaagattaggtacgtacaatagctattatatgtcgcaaaagggtacaattgctaatcggcatcttcctcaggtcacacgggttgccgcagatcggagagggataatccaaaggggtaaaacgaatctcacgtacatactcgagcgggtcgatcccattgaaactgtcacggggtgccgaaaatatcgactaaagatctcacggacggagctagctgaaacggcgctggaaatgggaacaaaaaagagggtacttttgcgaaagtggcatggctttctttgctttctttgcttgcaaacggcttcgggggaaggtaaagcgagacctgcatgcgaggtacgcagagtagcgcccaatggcgccagaaaaaaacaacgctggaatccacctggatcggccttttcgtctctttttgtttttttgtttttgcttattttttctttttttggggtgttaatctatggagtacaactgagggagcacgatttttcgtattgtaagttgtacttgttcgcacgtccccgttcctggcaggtttgacaacatcccctctctccacgtctggagataatggcctcttatagggcaattcagccggttcaccagaccagttccagttctccgtgggggaaggaaccttggacattactagataacgtcatctgctggggttatacaacgtacagattggactattctacatcaagcataaatgccaatctgccaatctgccctgagacagggatcttgaatgagacccgggaagtagggagtcaagatcataggcagttccccggaggggttgacgcactcgaatgttcttggcctggactagcccgttctccagatgggattcccttgatttctctctccctcataggctatataccacatccgagaaagctaataattcaataattcttccatatggtgggatatgatattctccatgaataggattttaatcaaagaatgtcaactaatcagaaagggggggggttctagaacgactcaagtgaggaaaaatggaccgtgtcatgtgtacgatcgacggggcttgtggagtgcccaggcttggatagacgggggttggagttgtatatgtgtaatatatacggataggactatggtaggtaactagttcactagttataggacaggatagttataggataactataggatgggtattactagatagatgctcgctacaataagatatataccctatataagactatatccttaatccttaatcctataaacgtccttctccagctcatctcccatttataaagccaaatagtgggggaaagtgacgaggtcttctgatcaaaaaaaaaaaaaaatcccccgaaccggatttctcatttcccccaccccacctgggctttttcaatggtccacccctttggttaaagaccgctgccctggtgctgtgggagatctttcttgttttctcccgattcttccgttttctctatatacgactcgatactggcgtatacctcgactatttacctcttctcctccttcttctgctacctttcaccaaccctcaacaatttccaatctccaatctccattctccattctcacctttctcctttataacggtgacagtgaactgccatatttcacttctataccttggccactgctctgatacgtcacgctccacttttctgccacgggagctggtccccgtatccccaacaccgccacctcgtagttctcctcccctccgttattcccctctttaaatcctggacagtaaaatcgctctctctcttaatacctcttttttcacacgttctggaagatgcgaaacccattcgatttggactttgatagcctcgatggagactccgagcccgcccgggatttcgaggcccccgaagaacatgtgcaccagcgagtggaggacatacaacgagaacacctgaacctcaactatcgtcccaaacagagagacgatggagaccggtcgttgctgcaggacgaggacgaggatgaaatgaagagtcgattcattggcaccattgaccagggtacaacgagtacacgattcatcatcttcgattgcacaggtgtccctgtcgccaaataccagactgaattccatcagattcatgaacatccagggtaggtgtcacaacccatccctttgaatcctcccccgactcaaatattaatttgccccgcacccccacagatggcacgaacaagacccttatgaattggtcgagtcggtctatatctgtatcgaagaggccatgaaatccttcctcgccctgggctactccacatccgacatcgaagccattggcatcaccagtcaaagagaaaccgccttggtctgggactgggagaccggcgagcccctgcacaacgcaatcacgtggaccgatactcgcaccgtcaacttggtccgggaactgaaagaaaggcccggcgccgacgaactccgtgatatttgcggcctcccgctctccacatacccctcgtccgtcacgctacgatggatgctcgaccatttgcccgacgtccggtcggcctatgacgatggccgcgctgcatttggaaccgtcgatagctggctcatctacaacctcaacggtggtccgaagaacaagcttctggtgaccgatgtgaccaatgcctcccggacgatgttcatgaacctcgaaaccctccaatatgacgatcgcctcttgaagttcttcgacattgacccgaccaagatccgtctgcccgagattctgccctcggccgatcccgatgggtttggtagaatggccgaagggccgctggagggtactcccattaccagctgtctgggtgatcaggcttcggccttggtcggtcactgtgccttttcgccgggaatggccaagaacacttacggtaccggatgcttccttctctacaatgtgggcgagaagccggttatctcaaaacacggtctcttgggcaccgtgggcttccaattaggccgagaccgcaaggccgtctatgcacttgaaggcagtgtggccgtggcgggcagtggtgtctctttcctaatgaataaccttggatttttccgtgactcacggaaggtcagcgatttggctgccagcgtgccagataatggaggctgcattttcgtcactgcgttcagtggtctttttgctccttactggatcgatgatgcccagggaactatctgtgagtcttgaacgtgctcgtcatccaaaaacctaaatcgctaacactgccagggggaatcaccgcccacacacaaaaaggacacattgcccgtgcaaccatggaagcggcctgctttcaaactaaggctatcctcgacgccatggcaatggacagtggcaagggcctgacagaactggctgttgacggcggcatgagtaactctgatatttgcatgcaggtatgttgcaacgtgttttctcttaaactctcagacccgctaactttcatttgtttcagacccaagccgatattattcaaatccccgtcgaacgtccctccatgcacgaaaccactgccctcggcgccgcaatcgccgccggcttcgccatcaatatttggaaggatttctccgaacttaagcacatgaaccgtgccaaccgagcctccttcgccccaaggatgtccgtcaaagccagcggccgcatgtataaaaagtggtccaaggccgtggagatgtcgcgcggctggatggccgacgaggacagagaggaatacgacgaataaacaccttttttacatatccttttgagatgaccccaatcgggtccgtcatcgaccccgcggcccagtttgtgcaattcataccatgcacgatacatacacacgcgcaagaagcaagaagcaagagagatttgagaggtttacatgaagatcatatcaaccggatatcgcatatattctctcttggagatacccggaattttttctttttcacagggacatctggaacacctcgcgtcttccatttatacatatttagagaatttccaatcccgactagaaagtccgtcctaataaggcgttttacccgcccacgccgatgtccccctccaatcatgaccgttatgacgggaagtcgtttgttccagaagaagagctggggattttaccttttttttttttatctcattttgctgttggctagcttcctctcctggaacaagctcgacttaactaccacttgtgtacatacaacccgtttttgagaagaaatgaagaaaaaaaaaaattataaacatgtcattctcgttcgtacgcaaataaacaatgaagcttaaaactttattattacaacattcccacccggaatcgagaataccccggaatccagtttctgtctccggattgacgtaaacaccatgacatcataacagcggggtagtaactaaccaagattactggttactggttctaaccaatagtggagtgagacatctggttcattttttagttcggcgatgtgttcaatacatacatagcttttcagatcacatgatcgcttcagcctgtggtgtcctaccatacatacatagtgaatagatcgtagaggcttcgctgttgaacccttggaagtggctacgatccatctaatgcatgtagagagggatgttgcttgggtcatttatattcccctgtcacggcttcattcacggaataggccgagatttggctgtctgcttagggtttgggttgttgctatatttggctcgggtgccttgggagggatatatattgtacaacatatgttcatctacatgtacaacatacaccgaagttggagtggaatatatgtatatttttattttcatgctatatcttccctctcggtcattttcatgaccgctttgtagatataaccatatgtctatgagagtaccaaagaggattggcagctttattctacaaatgcgatcgcggatcacgtggtcacgtgcaagagggtatatagatgacctcatatcgcggttattacatggcaaattgacgtcagatgatctccattcgagatcttcaagcgcggaacaacagccgataaccagagtcaagcgtcaatctgactgagacatgatatagaagaaagagaaccaaagagatatggtattttcaatagacgcctggatgatcgaggatgcaaaatggagatgagaaacaggatacatgggtggttgtttgtagagccaacaagaaaataagacaaggaaatgaacagaaaagtttacagagtcggagatgacttattcattgaccgtgggtgctcttcctgccgccgcggacgagttgagattggtcgactgcaaagcttcagggagcttcagcggtgcactgggcaagatcttgagtttattgatcttctcgcccttcagcaccagctccatctcctcctttgtgagagtttcatattcaatgagcgcattggtcagaagctcgagttccttgcgcttttcggttaggatggtggttgctcggtcacgggcttcttctataagccggcgcacttcgccctcgatctcttgcttggtttccgacgataggctgtcgtaattcgtagacaggtcgacgttgccgagtttcttggaatatccgaaccgggtgatcagcgtgaaggccgtctcggtggcactttgaatatcctaaagagaccattagtaccgagaaaagaagacaactaactagtaagacttacagctgagatgccactagtgacattgtcgtggccgaaaaccagctcttcagcagccttgccacccatagagacggcgatgtctgccaaatattcggtgtagttccttgaaacggtatccatctccggaaggaagtgagtaatacccagagccataccacggggaacgatggtgatcttgtacagaggagtagaggaaggagagaagtgtgcaacaagggcatgaccagcctcgtggtacgcagtcaagagcttgtccttgtcttggatgatgcgactgcgagcctcggcgcccatcataatcttgtccttggcccagtcgaagtcgaacggccccacattagccttgcggtcacggctggcatggacggcagcttggttgaccaggttctccaaatcagcaccagagaagccgggagtgcctcgcgcgatgactccgacgtcaacatcaggaccgtattgaatttccttcatgtgatgtctcaagatgtccattcggccgcgaacatcaggaaggtccacaacgacccgacggtcgaaccgaccaggtcgagtgagtgccttgtccaggagttgagggtaattggtagcagcaatgatgataacaccggtagtctgagagaatccgtcgagttccgtgagcaactggttgagcgtttgcttgacataagcagcatcccgctcgtttcgctttccacctatcgcatccagttcatcaatgaagatgatagccggagccttggcacgggcctgagcgaacaaatcacggacacgcttggcaccaacaccgacgtatacctcatcgaattcagatccagacatgtagaagaatgggacaccagcttcgcctgcaacagcacgcgcaagcaaggttttaccagtaccgggaggaccgaccaagagaacacccttgggcagcttaccgcctagggaagagaaacgctctgggttgagaagaaattccaccagctcctgcagctcatctttagcctcgtcacagccatgcacatcactgaaacgagcggtttgctgctcaggctgagcttccttatcctgcgcaccacggacgttcttcagaacgccagtggtttcaaccaagatagtgaccgtgaccagggagatgtaagtgaaaaagccgaaaatgagcaagaatttgacccagcggaacacagtgcttccgagagactcatcgaccacaacgtagagaggagcatccttggcaccggtaccgttttgttttcccattccgatttgactgccagtagcccgagcagcgaccgcttgaccgactgcctggagctgttcagggctcagattgtggtttgacccgccgaaagctccagctccggcgtcggcgccaccgacgattgactgggcctgttggactaatgcttcagttgtgagatctcctgcaaaataaccgctccggtgtcgttcgagaactatgcccggcattttagcacgcaagagagccgaataaagagcattttgagcgtctgcgttattgggactttgattggcgaccttctccttctgggctagtacatgatgccaggacccgccgaacaggaaccgttgctgctgtatcttcgaaagaccgttgaccttcggggccgcgcggagggagttaagacggaatggagttagagttgagtatgaacgagcaccggggatagcatagcggatcggcataaaagatgaggtggtccgaagtgcgttgtctgttatcaatgattagatatgattcatcaaagcaattttctcaagccaaaacatactttgattgagcaatgaagaccacgtttgctgcgaaggccggctgacgatctccgctcgcagggcttcagtggaaatgccttccaggtattcaggcaaggttgcgcgttgagagatctgtctgtatcagcatgaagatgccaagtggatgataggttatgccatactgtttcagttcctcggctagtactgcgccggaaagactcgttgacattgctcgtcgttcgcccggtctgcttccagggaacagccaggatgttatacattgaaggccagagatccgatgtcacggcagcgacattctagcagattttttgggtcagttgtgggatctggatgagaaaccgcggagtggtactcacaggcatggggatcgagacttggaaggccatgactctccgatatacagcggcacgcggccgggtgcgaggatgggcgtgtgctcctcttggtggatttacagccggaaataaaatttgaatctgttaagcccgggttgaagagactgtcattgctgacacaagaatgaaggtagagaagaaggcgataggatgttccgctttgatgcggcgaatggcgacggccacttatgtccgaataggcgaccgaatatatatcacgtgatattaagtggcacgtgcacggcatagccggacgcttcttatagcgtcatcagctctggtcagctccgatgaaggatggaaggagatttaatggggaaaatttgtatgaattaattatgcatgggcgatttggcagagaaaattggtagcaaacgggtaatagtagccgggaagggccaggtacaccagggctgttgccattgacagaagctgcccatggttcgcgcaccccgatctttacaaattgcaacgtcttgacgtccacgagcatttgaacttcatcaccttcttgaggctcttaaaagggccctgtgatccccctgctcgatggctccatcgacatttcggcccacgctttttctcacggacaagctccccttgacctgcatattcttaaagacagacttgctatgtctcgaaaatatatcttcttggtaggagctccgttgccagcaagtctgaattgggatacagacgagcttctcaacacgcccatacctccattttacgagaatacgacgagtacagaacaacagctatccctggagcaaccacctgtaagatggagagtgttacggtcagcatcagtcgacaagctaggtgaaaattatgactctttccaatactatgaggacccggcctttttcatctcgcatcaactggctgttgcgacagatgcgacacaaggatcagaagattcgattcttcaattctacgaccattctttcgccatccacgaaacgtccgaggtagctggctcagatgtgtacgtagcagattccacgcaggagagcagtttggacgaggacagcatgttggctagcactacggggctggacaagacagacactccgaggtcacctcgcattctccataatcctgggtccctcattgatttgaaagatcttcccacggccaggtacatccaatcgatcgcaccgcaaacgatgacggtgaatatgattgtgggagtgctggccgttcaccccccacgtcgcatagtaacacgacaatggaaaaccgaactggacctcatcgagcttgtcgttggagacgagacaagggctgggtttggagtcaatttttggctcaagccagagaagccgaccgccaaaaacaatgaaccggatcgtctaggtcgttcattggcatcacttcgacctcgcgacatcgttttgctccggaccgtcggactcagtacattccaagaccgggtgtacggacaaagtctgcgccgagggatgaccacggccgagttgttgcatcgacaaccggtggatgtgacggatgcagttggattctatcagggcagaatgcaagaaattagctcccaggatgatccgccggcccttaaggcccgcagagtacgaaattggatgctgcggtttgtgacggattcggttggaatgtcacatccatgtggattacctccggatacgcagtagttagttaattggtcaaagtagtaactattgctttcatgctttatgtgaaatgttaacttgatatccgtaggttccgtagagatgtgtctttagtgtacgtactagcgccagaccaattgtatctgaaacggaagaggggaaacagggaatatccccccaccaccaatctccccatcacctacggaggactccgtatatgtaggtttcaggggcgatacctcatgaccataagaatttgaggtttagttttgcgccatctgcattgtcgtataaatcatgcaatagcattggacatactggccggggatggctgaactagacctcaggagatcagagacttcatccacgcgtcagagcggcctagttccttggaatgtaattagaggaatgcctaatccattcacagcaagcaaagtacaaagtcatttcatcccaaacatccaaaagcagtcaccacagctctaaacagccgaagtcgaagtatatggcccccttttcccgcaaacaggcccctccaatcaccgccactcacgtgcccccacttggacaaaaataaatccatcaacggccaggtgttccctaaataacagagcgtctctccttttgcttctcctagcctctctactctattcctaattttctctaattttcactattactttcaattccaatacatcatgaagggtatgtgctattgtcaatgcttccatgtctccccgctaacccctctacagctctcattcttgttggagggttcggaactcgtctgcgtcctctggtaaatatcccgatgattatcttatggcctattgtctatttggcaatactaatattgatttattttagaccctcacccttcctaagccattggtggagttcggaaaccggcccatgatcttgcaccaggtcgagagcttggctgctgcgggtgttactgatatcgttcttgccgtcaattaccgcccggatgtgatggtcgcagctctaaagaagtacgaggagcaatacggagtcaacattgagttctccgtcgagtccgaaccgctgggcacggctggcccgcttaagctggcggaggagatcctaggcaaggacgattcgcctttcttcgtgctcaactcggatgtcatttgcgattaccccttcaaagagcttgccgaattccacaaaagccacggtgatgagggcaccattgtcgtcactaaagttgacgagccctccaagtatggcgttgtcgtgcacaagcccaaccatgcctcgcgcatcgaccgctttgtcgagaaacccgtcgaattcgtcggaaaccgcatcaacgccggtatttatattctgaaccctagtgttctaaagcgcatcgagctccgcccgacctccatcgagcaggagaccttccccgccatctgtaaggagggccagcttcactcctacgatctcgagggcttctggatggacgtcggtcagcccaaggatttcctcaccggtacttgcctataccttacttccctggccaagcgcaaccccaagatgcttgcccctcacacagagccttacgtttacggcggaaatgtcatggttgaccccaccgccaagatcggcaagaactgccgtattggtcctaatgtagtcatcgggcccaacgtcgttgtcggcgacggtgtccgtcttcaacgctgcgttataatggagaactgcaaggtcaaggaccacgcttggatcaagtccaccattgttggctggaacagctctgttggacgctgggcgcgtctggagaacgttacagttctcggggacgacgttaccatcgccgacgaggtatatgtcaacggtggctcgattctgccccacaagagcatcaagcagaacattgatggtaagttttcgtttctgatcactatccctaacaaacatgtactaattaattgtacagttcccgcgatcatcatgtaatccttttcctacttccccctcttccttcacgtcgctatgccttttgaaatacctcccttcaactctcgtgccgataccaccctccagtccgccctcttgatgcatagaaccggagtcgtttactgcgtttcttctgtcttctcttctattgtcggcttgcctttttcctccttgacggtttatcgccctcacaacttcctcccttccgtccgataatgcacttagaaacctagatggtgaaagcgtgcgatttcggctgttttgcaagaaataacttcttttagttttgtttgtctacgtttatccttcgagctatccccgttttagtgctacatattgagggtttcgtcgctacatccccgctcccctgcgcttggccacttgttttcattcaattttttcgatttttttttttactactgctagtcttctggcaattgatgggcaaagaaatcatgccatatccgttttaatgagaacatgggcgtgggctggttctgttgatgtaaataatgggaggcgaaattcgcaaaaaaagatacaagtttagttgatctttaacacgattcttcagatgtttcatatcagatatctttgtagaagtatcatggatggaatattagatacatatttggggataaattacatacagtcattgaagctgttctgcttgaatcagttaagcaggaaattgacttgagagaagcataatgtgtctttgacaaagtcgtgtctaggaatgagcctcagctcgatccaggatctcatcccattgaattctcaactcttccatctgcttccagcattggcgtccgagttcctcgaactcttctctcttttccttggtaagatcttctgcgccgcgcttacgacgtcggagccgatcagcctcaacgacgggcgtgccgacaacacctccatgtccccagccgtcgacctcagtagaaaccgcactttcaatgccaagacgcccgcaagacgaaccccatttcgctctaccgccaccagcccggtggtaaggctcttcggcagcttccacgtcagcctgcgatgccagcgcgaggaagaccggagcacaagcgccgaggtaagtagacaatggatgccagggcgagcccagcatcctcgcagtccagaaagcagcaatcatcgcccacgcaaggggcagaataagcgggatgatagatgtggcgcagataccagggtgagaaagatacatgcgcggggtcgcgtcgggggcatttgtgtggatagcatgtgtgtcaagttccgtctcagactgcaagaagctatcgacaacccagggggccgtactcggcagattggaagtcagcgcgaggatatcagtgagagccttagaagactcatacggcgcatcagtgcgcaaaccctgaatatcgtctattttgaaaaagttccaagtcgcttcgagactagaaacccagaccacacggccaggcccgttcgtgtgcgcccgcttcagcagcggaaccaggttgtgcgccagcatatagtgcccgaagacatttgcgcaaaagactgctccgagcgcgggctcttcttccgtctttgtttgcttgtttgttaacacgcccgtcggcgctagcttataggatggccaggtcaccgcgtggaggagatcggtgcaaacctcccaaatggccgtgggccaactgatgccggaccagccgcccagcccggcattcagaacgatcgaatcgagtcgggggagagtgtgcactagttttcgggaaagttcgcgcactgagcggagatcgccgaggtcgacgctctctgagacgaagtggacgcgcgcggcggcagatgcggagggggaggttgcttggaggtgtgcttctagtctgcggattgtgtcttgggctttgcgcgcgcttcgagttgtgaatattatggtgagagattcagattctgcgtgggaggagaggaattcgtcggcaaggcggcagcatatggagaatccgaggccgctggatggtctgagttagtatagggaattgagctgaattggcatattgagaggtttgcacctgttagcccctgtcaccaggatgtgcaacatattttgctgctcagcggacttgacctgatccatggcttgttgcttcggcgagtttgttgactcggcaattttcttgatatcggagataggggttaacgtgataagatgctcaacgattgaagctgaggttggagaggattttgcgcgttgtcgcaatggaaaagacacgcggcaatcagcagcacctgagatgaaatgaatcccccgaagtgagcactgtcaatgtctcttgtcgaaaatccaccgaacggggaaagtgcccatcgcacagatcacgtgttcaactttaatcttatcgttatcggattcgtagtccacctggacgggttgttccaaggttcccgtcatactcgcttttcacgttttatggctgagatctgctaaatcttacccaaatgtcgtgcagctggcatacaggaagccatggtagtcagacttgagcggtttctcaacacaaccggtttcttcttcttcgctatcgtccttttctgcctcatcctccttacaccagcggacgccatttaccaatgctacgagactaatcgactcacaaacatcttcttcattaccggcgcatatgtgatcaccttcctatttgcagtcctcatctatgcgacacgcatctacacgaatcgcagtgcactcaccggcatacccaaagcctggatccccgtggaaaaggaagatgtgaacaagagcgttaggcgactggtaaaggaaggcctcatccgtagcgccgtcatcgcctatcaagcccgcccacgcgacgtctccaccgatgaggacagcttccaaaaatacagatcgcttctcatcgaccccgaacgacccccatggggccatgtcgagcaccccggctggtcttcgccagactcgccagacttaccgaatctaccataccgcacagtcatacacgaactccccagcttgattgaagccaaagctgtctcccttgcccctattgattcattatcatctgcgcccacataccacttcgatccgtcaggcgaccttacgatacagtctctcccggatacacgcgtggtggaagtattacagcgtccagcgtcaatgggtctgagagaatatatccgccatctgacgtccctcggggctatcaatccgccagaactcggtgcggatttccttgcgctgtacgaacaagccagattctcgacgcgcgatctacacgagacggaattccgcgacctgatgcacctcttcgcggagattctgagggggatgacatcccttgcaccaccgatcctggatgaaattcgcgacagcgctagctcccggcgagcctatagcgaatctagcattgaatcctcggatgatgagagagaaacagataccgggacttatggttatgacgggactctagggtacatgcgaagtaacagccttcgcccatcgaatacgtctacctgggagacccagtccgggtatgacactgcgcccgcaaggcaagatgccgcgtctgaattgtcaacggacagtggatcctccgtggcacgaagctttcttcataccccttctacgaggtctctacgacgcgtggcctcgggccaatccggcagttcgggagggagtgttattcgtctgaggcagccacgagatccgacagatttgccgtatacaattgactacgctggacgtaggcaatgataataatccattcacacttgtatattacctatagagcaacgctatttggacacgcaattgcgccaacggaaccttggaagtggggatggacttagtcaggcggaaaacattccgagtcctgtccttggcaaaacctgcaaaatgattgataagatcagtttatcattcgacgactcgtcatcagaaaaaagagtccaaactagcagatcttctcctttttcccattgttgaagaagatatccatatcgtgtaaaatgcatctctttcgccgcgggacttcctccctctttagctcctccaatgtctctgccgcctcctccaggaccgacatcaccaccgacgctgtgggtgacaataccctcgctgcagatggcttccaaaaagtctcgtcgagcgataagctcttcaaaaaggtcgatccagtggtagacggcgaagactgcctgcacgactgcgcgacatgtacgatcaaataccccgcaaaattcgatgtcgatcagcaagacgaactatacggacaagtcaacggatgggcgacacatatgctcgtcgcaacgggcaagtcagattgggtgagagacgtggcagacgagaaagggagcgtcatggaagccattgaaaagggaggactggagccgagcaacggggtatgacaatatcccgacctgccaaagtcaatgacatagagactaacaaccccttttcacagcgactcaaactgtcagcatccaacatgcccgtcccagacgaataccacatagccgacgcaggcaaacagcccacaaacgtcctcctgctgccgagcttcaccgtcgtcgaggacgtcaccccacagctagtcccagatttgatcgagaatttcatcaaccggaccctaacaacaacaacgccactaggcgcaattccagaaaaaccaacagaggaagaccaagaccaagaccaagaccctacgcaaatagacctcccacacccatccacaacatcaatccccacttccctcaaatcccaccccagcccgcacgcagccgtaatcctgctctgctcgcaacgcacgcgtgatgcgcgctgcggacaatctgcacccctcctgcgccgcgagttcgagcgccacctgcgcccactcggtctgtaccgcgacatggacgaccaacggcccggcggcgtaggtatctacttcatcagccatgtcggcggtcacaagtactccgcgaatgtgattgtgtaccgccgccgcgacttcgattggtacaagcgggatgctcctgcggacggggaggggcgggcccctgatgagggtgcggcgcagggaatctggctggcgcgtgtgcggcccgaggagtgtgagaatattattcgatatacggtcttgcaggggaagttgctcaagcccgggcagcagttgcgggctgggtttgatcgtgagcgtggggtgacgagttggtaaagttcgagctgggttggttagttggtactttggagttggtttagtggatatcacggacatattgctattctcggctgaggttgattgcctgatgtatctgatttgtgcttttgtcttagtattctatacatgtggcgctgcgccccaggtcagatctgccttgcgcatcacgctaatagctttactccgtattcgcaggctctgtactccgtattgtatttattattacgattgtacggatttcagaaaagaggtgtatgctggaggtatctccagtctcatcaacccttggccttgtttcgcttcccgtgcctcacaggatatcattcgccacttgactacagtgatatctatgtatacttctattagatgaaacatctaccaacgccgacaagcaatcgatggctatagctgctcaggctccagacacgtgcaccatgtcagccatgcaagtcagattgcaaggtcggcatttgtcagccctacagccatatcaaccgcaaatgtcggatctccctgtcttattatagactataactagtttgttatgtatgaaaggagacagacaccttacgtaaacataaccaagtgattacctaacctcccacctggaccgtgcaccggtggacctcccgtacccggcggacctcagggggcgtgctcaattttactcggacggaacaccactgtatcccaaacatccaccaaaggattataaagccacgctatcgactgtgctccatagcacgttagttgcagcaaaggcgtgcatgcgtacccgacggccgagacggccctacaaagaaaaacccatagaaaaacgtcatccactgcgaatgagcaaggttcattgcccatgactggactggcaaatgatgcaaggccaaggcaacaccagccgctagttatccctcaaccctcgggtttctcgctcgccaggctccaccgggcttgtttgaaagtaacctgggacggtcattgtacagaatagagccgatgttcccccgtgtgttgcggttatcaacgcccccttgcacggaaaacggtgggttgcgggaatttcgtacatattgttgtcttatttttgcgggggaggacggaatcagctccaaacgccaaactccaatacgtcatttctgggttttctttcgaggtatcttgtatcttctatatttacatattcgtgctagataggagctcggagatagtgtctcttacggcaagacactcccgggcgttcagtaaggaggactgaattcctttgctgtcagccgtgataggggcttgcggtaagttttccgctgatttgatcacattcttctcttcttctcactggcgttgttggctttcagaaccaacatgtggtgtctaacttcgaaaccagagtcaaaatacctgcaaggggtcaagtggtggctgttcgccttgtcgcaacatcctggccggtaagttatcatcgagcgctgataggcaaagcccggcgttgaccgacattcgcgcaacgagagcgagagaatgcgaaatggcacagaagggccgagaaatgcgaggaatttgttccggcctattccactccggggatattaacatcgatcatcgaccgtacgcacgcttggagaaaacatgaccacattcataccgtctaccgcctccttggtgagaaagctcgcggagtaaacagccagattgccgaatcagaatccacaggtttcttagcttccttaggtctaaagtgggggatatggatagtccaatgagctgctctcattactgcgtcgccatgcgcgcgtcggagattaatttagtggcttttcggagcatgtggaggatatttgttttggtccttggagctggtaacctttttcccaatcttcacatgggtataggtgatcgacatggagatatgtccgatctgtttatttcacactgtgaatccgttttgattggactccgtaccaggtactccgtacattcgaatgattcatatttcgtatacgaccaattaccaacaattaccaacgctgttagcggcagactgagggccaaatcagagagctccccgacagcgtcatatcctctcttaatcgccaagatgaaacaaaatgcggggtagtcagagcttctcagatcaagggaaataggtagaggaaaaagaaaatagcgaaaattagagtcccttatcgaactctatggtaaccgcttgaaagccattgtccttgcgtgatgtgatgcgcatgcagcttcgaacagctttgcaacaacttccgactcccttctcctgcattttacctatttcaatcacctgggcaagacggtggagttatcaatatccaaattccaaatatgatatggcccccaaacgagcccgtccctatttggaagccatccactccacaaataagactagtcttagtagtctgcacgcgagaacaaagaatccggacaccaggctcatgggtatctctgaatgacgcctcatttcttttatcctttatccttttttcgcatgcaagcacaccggtttttgattttctcttgccctactagccgcgccctgctttacggcattactatagtgtatggagtatggaaatatgcatatatgcctcaagtggagcatgcatgtgctgtacctacctgatcaccctacacttatcatagccgagcgattaccgtttcatgtagcgtgtattcagggaaccgattaatgatagtcgcggtttatctatgatcggcggcgacattggcgctcttttctgatcgggggtttctgttcgatgtttcgtgttgacaaatctggacccttagggaaatagtgggctgtgcaattttatgtacactatacaacatacaatagcatttctcagtataatctccattcgttcttacaaccgtttatccccataattcatttccaataatattttgattcctatgtcatgttcgattacctcaatggctgagccgggctgtctccattagccactcaagagcatttgtgtgggtccaatccacacattctgcttgcctcgtacactgcgtgcatcatcacgatccggatatgcagcactattggtccttcgaacgagatctacttcactccgcctaccaagtaagctaccgcaacagatctgcacacgttaggcgaagctcttcgaagtactttatacatccctccataccttgtaaacagggtttgtcgatcacgcaaagcgagcaagaagtgaaaaaaaataatacagggaatctataggtcggtcctcattactctggtgtattaaggttgtaagatcagaagatcaccgcagtgaagatgagcgcgagtggattgccacgttcagtaggattaggaaggtagtggtggtcacccaaacgcctcttctattttcgttcagctgttggactttgccaggagatctctagcccgctctggcattttcggctctgatcaccgtagttgttgcgcgaatctcgaagcctcttgcgacaccttttgttgagtttatcgattggcaatggggacatcccgcgctaaccgagtctacccgataagccttgtgaggcgacatgctatctgttggatgctgagatggtttcgccactggattttattagaaccaacatgagaagctaagtggtctatacagcagactttgggtgcgaagggagctaagtgatcgacccagctatggataaaaagcaaatattgtgattggcgctacgggagtacggtgagagtagtgcctgttcagggatagcatgggtatatcaaagtctatggactgaccatgtgaatgtagaagtacaacatataacatataacatatacactacaatatacacagacacagacacagacacatacaatttagaacaagtggagagacgggaacagccccaaccttaagggaatgggacccgaggccttggggctgttcggggtggacaagcgggagagctggggtacctgacccatttgcgaacaccgttacggggtgcagacgccgcgtcatagggcatcccttgcatttgtcgtttctctcttactgttatttacttcttccgagagtaatgttgcaagtgtttttgtggttctttgtttatggagacgcggatattaatggagtccttctagaccctagggaaattacttagtacggagttctgcaccgccaatcccattgacttcctggagaagatcgtttttagcgtcggtgaccttactccgtcgtgaccctctctcatttggaaactagatcggaggagttcggccgcggctaaccttgggaaattggcttggcttgattgtgtaagttgttatttgggagtcgttgagtggacggattcccgagcccccccaatgaatggagaggtacatagtacggagtatatatcatctacacaagttatttggtggcttctttagaagtgtaattgtatacagtatatatttagtctcttatacaatattatagtattatagttaactagtcaccaagttagttaggtagttcgatattaaaggggccaagaactggtttcaaaaatacggtcatatacaccgtatccataccataccataccatgcccagtccggttagcatgtcttgtcattcgggggccgaggtggggcatttggtaaataagctggtaatgtgggggtttcttttttccatgggctatcgcaatttaccattttcagaggtatcccgttgacagtcaaagtttgagtctgaaggtttggaaataaattacctccacaggtattagacggtttgccgatgtgttaccctgtcgagttgagacatgtatttctttgtacaaattgggaatgaattagggaaagagagtgtcgagctaggcagtgatatttaagctgcgagctgataggcctgttcgtatataggatatatcaacgagtgtacctggtacctcagggaaataataatataataaataatatatatataataaaagaaaataataaataaccgatataaaaccaaaataaaataaatatgctcttctacggtcccatccgcgccgtttttcctcccccttcaaggttatattctaatacttgaggctcccctcttctggatcttgatctctgtcagcgcatttcgtttatattatgctctgcgttcgcaacatcccggctaccaatccagcctgaccaaggatctctttctctgatttcaaggtcgtctgcgatcgcatatgcgcttacgttctttcccctccccccccctcccctttgtctattacctggctttccaagtccacgctttagctattcgcgctcttgggtctcatcatggctccaggcagtgggcgcgactttaactgctcgtgggagcattgtgcgaaggtgggtgtatctccgcgggctctactcgtcatcctctaaccggtttagtccttcaatcgcaaatccgatctctgtcgccattatcgcattcacaccaatgagcggccgtatcattgcaccgtaaaggactgcaacaagagctttattcagcgcagtgccttgaccgtacactcgaggacccacactggcgagaagcctcatgtctgtgaccatgaaggctgtcagaaggcattttcagatgtaagggcttgaatctgtatgtggcgcatttactccatttactaatttctatagtcatccagtttggcccgtcatcgccgaatccacaccggcaagcgaccatatatatgccacgagcctacctgcgaacgcaggtaagtactctgcgtggaaagtcgacagcgctattctaattgtcttgttgaaactgcagtttttgtcgcaagaccaccctcaccaaacaccaacatcgctctcaccccccggggagcttgacccgaccatcctcagaagatgcgacctccgagcactcgtaccaccaaacacccgtgccggtctcgggcccaggtgagcagtacatgctcggccagcaaccgtattacccgcaatcggcgacgccgagccatgagtattactcgccacagagtgtgccgatgggctccgtgccggttcacgaaactgcccctccgatcgtgccgcagcctgtacctggatcctcgccggtaaacatgccacacccgcaacagccacacccgcagcaccatgcgcatccgcagcaccagcaccagcagcaccagcagcaacaccaacaatatctacagatgatgcaacagcgttacgagaccagcccgcgcgccaactacctcccagaacaataccaacacccgtcttttcaaggccatcaactgccacccgaacaaccaatgatggtttcataccacccaaactatgcgtacaaacccccaggctcccgtctcttgaaccaagccgaagggactgactggggctttttgggagtaggctaagacgagactccacctagattgtggacccaatgcgtgtttaatgcccgttacgactttccctgctttctccggctgtgtctttgcttttttttgcagatcagaaatccgcatatgtttgtttctggttctggttcctatctctgctccatttctagggttcggcgctttgattatggattcccccttcgatattatgttattctttttctatatattgtcattttaaacggaggcaaaggtgttacccttctcggcgaatcatttttttttgatacctgaacatgggatgtttttttctttcttcttttttctgttctattccctacccctgcgtgtattggtcgtaagacggtcattccgatatcgcccaatgatatatcagcagcagctagttgtttcccaggaatattactgcgatggaaactgcactctgattggctccaggacttagcctttgaacagaaatcctttccacatcgtatattcacttctcttctcagcctctcatattatcctacatcctcaaactagtcctcgaactacggagtacatagttcatagagcatcatgtctgattgatcgaaataaattacatggcatgactcgtgggcttctcgattccttctgttccaaattcttttcttttttttttttttacacgcggtggccccattttcctcggaaagccaaggacagagccaagggccaagggaaattcgaggagcgcaaccctgtctcgctaacaaagacgttttttgtcgcactcgttttcgcttacccttctagaatcggtgacaattatattgattaatattcttttttaggaaggacacttcagagatctagaaaattatttccatgactctctactactgtctaactacaacatatctagtcacagtatcatgatacatttgtctgcctgcaacaacacccctgtagaatccattcggccccttcgcatccccgagatcccgaatgcaacagcaatttgttttatccctcaaacatactccgtagttacctactagatgaatcctggtggatatctcggtagggatctatctctaccagactactccaccaaagcggatacggactagttccctgctctgcatagttattgagtaaccgatttcgattcatatccaacgttgcactctgtctagaacaatatcgccactggtagcaaatcaaaatatcagtcgacagctccgtgggggtaccgggtccagaggagtccttggttaactagtgtgttagtattagtgtgttagtttagtgtacatggctctggccctggccctggccctggaaaggccttgtggcgaacaggaaaatttctctctttttttttgaacaagggtctgtttgcctttgccgcttctcgagacgagacgagaccttggtgagacacctgcgtaccagggagtttgtgtaggtttgcttgattgtatacggggttgggttgggttggaaggtacgtacaaggtacttgggattcattggcatagagatatatatacgacgcagccaatcagaatcgaggaatggaggggaaatgccaggaagtagatttaattcgaatatctggcccaaaccactgaaataaatgaattaaaagagcattcgatcggacgagtatcccacgccattgtacgtagtgccaaatatcgacatccttctattcgactatcgcctgcagcccgaaaccggttttctattgggttgtcaggctactgtaaggctctcaaactacaggcggataccatttccgatttgaaatagaatggattactacaacctctcctcctgattgtctgccgttttacctccccttttcgttttcgcggagatctctttccctgaatattcaaacggagtctccggacttttgggcctagacactgatgcagatccatacagggggggcagggggaagaggggggaacaaagccgtccgagagtggggagattaaaccccggtgaacgtgtggaatgtgaaagggccggtagatcccgcctccagaaggatcaccaatttatttccagccggaggagaataaggacacaaagacccggcctgtcgggccttttcccggcggactggatggtatgtatgtatgtacctgcgcactgttccggacgctactactctatactactctataatctatgtaggtggacgcaaaaagcctcatattacttcgagccgaggtgatctacgatttatctcgtatactagtaacaatataagtgcctccgtgggcgtttcctcgtgtttttctcgtgtttcatggggtcgcccctcccgcatgcaagtcacaaaactaactacgcaaactgggcgttgtgctagccttcaaaacggggtctggtttgactagttgtctccaataccccccaatcgtggaggcttgacggggtcccgagagttgttcatctcgcttctaccgagtaccatctgagactttaatttactgatcctagcctagctactccgtagttagtgatgtatactagtattcattttatctccctccaatcgatctaccaaatcacaaagtggcgctcccgtcctgcgatggggcccaacttcccgagtcgccatgcaataactataatatactagtattaagtaagtaaggttggactccgtgctccgtaccctgtaactccgtagaacatccgcccggcgaatgcaaatccagacttcggacgatgatcaggactggaaatggcattgggcgggcgtaccggagtttcaagttcgcttaacggggcagctactcccgtgggcgcatatacattccctggcaagactaggatctaatctaatcgcttgctggggtatattgtatgtatcaggatatggatgggctgagacggaatatgagcgatggtgattggttcaatcttgcgtgtatatggtggaagactcaaattcgatggaacatgcaatcagaaaacgaaacaggctgattcaccgaatcgagaaatcacataaggcatgatatccagcgactgcccaatccaagccaagccttttttcctcgtatcaggctactcggccttgatttttctccaggggcaggcaatagatggaggacatcatacgagcgacatcgaagcacagcagtatttttgaaacctattttgcaacaagcgcaataccggagcagagagaaataggacaagaactgcaagcctcaagggttggaagggaagagctatgcgcaactatttccgcttgtgggttgatcggctatggactcatttcctgattacaatctaatagttatagttggtataggagagtaaataagtactccgtactccgtaataagctccgctgtgagatccctagggtcggtcctaagagtcggtgtgggggtattctctaacggcgatctaagggggattaggaggatggacccacccaagctggactgccgtgtgaatattcagagctcgatacataatagttcgctagaactaggaataggatgtgtagttatcatggatatccttatgttgtatattgtatatggtgtatggctactgaggttctggataggaaaatagaagacgacacagaatgttaactatatagctagtgtcggagttaggacataggctatttcctattccgcactccggagtactccgtaaagcaaaagtaattaattagtaggcgccgttgcacggagtctggcttgccggtgttgacgcggggtggagacgtcagcttttaacttctttcctaaaggggtatgtagtgtgtaagaacccctggtcgggtatttatctgaatcggggttatttctaacctatcgaaaggaagtatgtaaatgatatacgtacttgcattctataatatactgtatactctatacggtaactacaatatatactatatactgtatactcactatgtatgtgtatccaaagtcaggagcttgggccttcgggagcaccggggtacacggcacagaacctggtaggtgcgggtatggtattgtcacaacgcttgacattgcggacgctatggaccgttcccgaaggtccactggaccccggtactggtgtattggaacggtaatccagtatattatcgtactgaataatcgaccgaaccacattggcccaaaagcaaacaggaaagaaacacttggcaaatccacaatgtaacctgtcgaagacaattcgaaactcacctcttagccggtgagtttctggttccatgtggtccccgacaagacctgcaccgtctacatcgggcatggtaagaaaagaggagtccaaggagaagtggagtatccagttcgattccattatacataatgtgagaatccccaactcatgacatattccgtctggagtcagactagcctgatccatgagacctcagaaacaagctttgtggaatggggtagaggacgcgttcatctcagatcggggtctatccaatgagttggacgcgaggtcgtttccgaatcgaggtgatgtccaggtacaatgaagccgtgggtcggaccttgaaatggtaagttggatacgagcgatcgacggatttcagtccgttcgggtatttttgcggctcaggccgatctcaaagttcgaatttggttttggaaacgacaatacaccgaaaaaaacaccgaaaaaacaaatacaattgaaattaccgctcggctagaaagtttcgacattctaaaattatatcttctggaaaggagttcgatgaaccagagttcgtattcaaggtatgtttggtctagattgcgcgggatccatagatcagcatcttaaagtgaagctatgtgtgccgaggagatacaacatagacattctgttacatcagatcaacccactctatctggttcttccaccctaaggcgtgctaaccagatctgcttccagatcggatcctcgttttatacggtttctatcgtgacacgaagtcgtcttagtacgagtagtacatgtccgtcaatcaagtccgaatacaaacaaatcatcacctcagcaataaaatacaggacgccatagttaactaactagccatcccgcaattctcacagatgccccaggcactcagcctaaccgcatctggaaactttagacgagaataccggcgcctatcacagtgcctggggaagtgtgtatccgtatcatgtccatatccatatccacctgggcgtacaataacttactcctatcccgtacagttgataataatatagttgatcttagtgtacgacgctggtaacggctgcgtttataagccttttttcgtgcgacgtcatccgggctggataaagatgttgtaccatgtagaccaggttcctatctaggaatagctatcctggcacagatacaagatgataccagtcttgcattcccgaggtaaaggctgatcggaggtttttggaaatgggggctgatgtggcttggctggggaaattgggtagctagttaaggctctcagtagtcagaatgtcagagtcagaatgtcgcgagcacatggtgaatggctttttgaccgaggctggctgggaggagattgggccgttgcgatgttgaccacccctcctcggcttgaacatgagcagatacagtagttacgtgatatcggtacttgcgtggtacatgcaatggcgacctcgtgttccgttatgttaggtatggttattcgaaaaaagacaagacgcagtctgaaatatgtgcatgaatactctaatgtagcttctctaagcctttctataaacccccttccagctaccagccgagctagcaagttggtgttgacacaaaaggtgaaagtaaaaggcctactcatccgcaacggcaacctcagcatcccacttcggcgcgcccatcagacgagcacgcttaacaacacgctcaataccatcaagaccccgcttcaacacatccatcttaggcccgtagctcagtcgaacgaagtggtgacacgggctgtcgaagagatcacgacgcttggccgggttcaagtcgaagaagataccaggcacaacgatgaccttctgggtcagcagcgcactgaagaagttcagaccgtcggagatgttagcctcctcaggcagagggggttcgatggaagtcagatcgagccagacgtagaaggtcgcgccggggacgtcctggacacggaaaccgatatcgtacagacggcccaggacgtaatcgcgcttctccataaagtgctgctgcagcgccttcatctccgtgcgcaccagccacggctccagcatcgggatcgcggcttcttggaatggcacgttggcaccaccgtcgaggtacgatcctgcggaacctagggcgtcgacaaaatccttgggtccgaccacccacgcaattcgccagccaggaaggcggaaccgctttgtgagcccatcgatcaggagaacgtctgtgggtccggttagcccatgatcaaaaattaggttttcggcgcgggtatcgtaccatccttgttaacgtcgacaacgttcgatgcaccactgattgttgttccgtcgcagcccgttgtgtagttgtatccgccgtagaactcgtccagaatcagagtcgcgcggtcacggcagaggtcctgaatttgttgcagctcgtcttgcggcatgaagtggcctgtggggttacggggattggaggtcagcagcacctgggtaccacgggcgatttcctcggcgatcttgttggggtggatgtggtagtggtcctccttggaaagaggaagggggatgggcgcaatctgcagggaatcagtaaacggcaacatttcgggctcagctcttctaacgcacgttcttgaacagagacaacatctccgagtacgcagagtaatcggggatggggaaggacagatacgagtttccgagaatggcagcaatgcgaatcagacccgcgcggccacctgggacaatgcagacattctcccaggtatactgactctccttgccctggcggtagtggtcgttgtacagacgagcgacggccgcgcgtaatggcttgataccggcggtcgggccatattcccgggaagcggatgtgatgggaatagcagttgggcgagggaaacttccctcgatgccgtcgtcagcctcgggggctccctgacctagattagcccagctggaaggatcatcggcgtagccatgctcgcaggctcgctctgtgcaccagacgacaccggtggaggcacgggaagcgtcgagaccggcgtggggacggtgaccctcgtgagcctctcgaaattgccgatgggtttctgagttgagttctgagggtttccaaagttagaaagctagaaatgtcagaaacgtgtcattgcataccgttatccgacagttccttcttggccgagggattgcggttctcggacgggcgtaggatgctcaggcggcggccggagaacgacattcttgcgagtgttctggtttgattataaaaatgattacagcgcctttcttataagaaaaatagggaactctcggaagtgggaggggcaaaagtgaagaaaaaagtcatctgcagcgagccgggtctcttttatagaaggacgcaaaggccgcttgccaacacatactaggacgagcacaccgactcgactcctattcataattccctcaatcctcaggggcaacaggcgctccgcgcatatattaatagcgcagaccaatacggtgtgatcttgagatatttcctatttagtcttttagtgggcgatcttccgaatagtagccgggagtgccggaactacgtttcgggtatcatattcagctgctactataaatatagctattcccatacagagctatagcacagagctatagctactccgtatacatcgtagctgtacggagtagactaacctggccttgccaagaatatcggctatccgacctgctccggcatcccgatctgataggcatcccgatacggattataggtctggtatagattccaccggaaatataaaaaaataggcatatacatcatatggaagcttcgtacgttcgtggacattgagatactagtagatcagtaaagagataacaatccgcgaaatgggaacgcaaaatcagaataaaaaaagaaacgggacgtctttatcccttcacctcgtcaccaggacatcattcatgccgtaaacaaatcattagatgctcgcctggagacgccacagtccaactacatgtttgccacggcgtggctcgctgaaagtcacaaagaagaaggggagatagaaagaagtatctcccccgagaacggctgctcaacagtttcaggccaaatccagttgggtaataagggtcaggatgggagaacgagcgccacaggcgatgcaaagcattgaaacgacgaggatcaatcctcgccggggggaatcaagggagggtattaagtcaagaatgagcggaaagcaaacaagaaaacgaaggatctaatcgaccacctggcagtagagttgaatctctcccaccaagcccttggcgagcatatcacgatgttgttcccgccattccaggaaagcgagctggaccgcctcgtcgctatcgatcgtgacgaaatcaccgtcttcatcccggtagcgcagccggacacttttgctcccgatggatcgatcagtgaaccgagcgagtttggcatccacgcggtccgtcaatgaccggaacataatgttggtcgcaattaccagcgtgacatagttgtcctcaaaattcaccttggccttgagttgagtgggcatgtagtctccttcctctggctcttgggtcaggggcgatgtggcaggatccgagatttgcccagaattgcgggtatcattatattccggctcgttaaagtgcgtcgtgtggagttggggctgggtacgaatggggagctgggtgttggtgggcgaaccgttctggctgcggttgacgggggttatcatgttggccatgtgcgcagggatcgggggcacggggacattgtcgacggtctgcatagtgtgcactcccatataacgccgtgactccggattgttactgtgatgatgaatatcagggctactagccgatcgcattcgctgggccatgccatttgcgtgagactgcgaggctgagagtggaggcaatgacggacgctgagcacctcttggaataggttgaggtgggaaatatccgccagaggttgttccgtcccgcgatgttacacgagacaacgctggtgctgtgtagcgaagggtatcctcattccagaccgatgattgagtggtggaattggtattctgacgactgaaggagaaccctgcggattgagaactcgatcttgtggaaggagtctcagtcgtgggggaaaagtaggagcttacgtttcgatcaccgggggacatgcttccgctcccggggaactgagtgtgcagcgcaatcgttggatcggttcccgcatagcgcggtcgggtattggggtgagcagcagagatggagctgccattggtggcagatcggtttctcagactagtactggacggatttcggctcatggggaattcggattgatatggatctttgttgctggcatcatcggtatcatactcttgttgataggggttgggaatgtgcggcatgccctccatgtacgtgaactcgctgtcggatgtaccagtattgcgcatagtgcgtcgctccgcttgaatcacccgttgggtgtcaatgtccttgtaccaagtccgcatggtgttctcgttaatatatcggatgataaaattgtcaacgacaccagggtctcctttccagaaaatctgaatacgatagagtcctgtgtgaaccgattagaggtatttttcttaacttaagaagccaagagtgatccttaccaggcttttgaagacaaacaatatctgtgacgttggccatgtagattcgacctttcagttgaagacgagcctttcctttcgcattcaaagacggcttatctttttgcatcataagcttagacttttgcttgttgggattgatatctttgcaacagagaagtattcgctcgaagagatagatatggtactaaaagccatgttagtgacgtgccatttcgggaaacaaaccataggatcagacagtacctctctttcgctatccttaccactgtctcccttgacaacttggaaggtaccaaatcgaagaagatctccgaatgactccattttcaatgctttccagtcatccacgcgctcggataaatcaagtaccgccgcagtcaaatgttctttgtggattgcctcgttagcaaagtccaacacagtctggatgcaattgactgcacgcgtgatatcggcctgcagttgctcgtcttctaattgtttgcgtagctcctgaaaaggtacagctatattagctcgttggtcttggacctagcattcagcaaacttaccaaaagcatcagcgggtatcgagtcaaacgctggaagggtttcacaaagaatccattgagcgttttcggctgagcgaccatttgctgcagatctatatggcgtggcgcactttggattttgtcccagtccttcatacaagcttcatcacaacgcatctggttggcaatgaaaggctcatactgccggaaagcatcttcatgcaggaagaaaaggtgaccccagttctgcatttcttctggcagggcgtagtgctgctccatgcgaatcaggaatcgttgggcaaagtctagtaggttgtttaaattgaggaaaatctgatggctcgcatcacctgtcaaagcacctgtctcttccagttccttcttgagcgcttggagattctgcaggtgatgaacataatcacgctccgtctccaaaagttccttgaggatatgctctcgcttggtaagcttcacattggttttcgcgctgggagcctctagaacttcggattgctttagttgaccttgcatctcgagtatgtctaccacgcggttgaccattttgatcactttgatgaatccagtggtactctcgccgtaaaggtcggtgatcaaaaagcaatcctgctgagggaatgccagctcttgtaaacaggcctgtaggaacttgaatgtcgccgctttgggacgcttcgcctcagttaccttcccagtatcaatttccagcggctcgtcgggaccagatgcattatagatgctcaatagtggatagccatttctgagacaattccacaaggaagccaccggatctgtatttcctcttatgcgatcatcatcatccatctcttgcaagtatgactcaaaattgggaacttcggatagccgtcgcctcagattgacacagctctggtagatcgattcgccaccacggcggttgatgatgttatcctcggcgaccggagcgccgctcatggctgaagagtcaatcatatctttcctcgggggccagatatagatgagttagaccagccaggctcaacttaaatctgcacagcagacccaagagggataggttcggaaggatcgacgggcgtcggaagtggagagatgacgatcatgagttccccgggggcgtaagctgcgcggcgcagggggtgtcaaacgagagtttcgaaattccgacagcgatccgatcagttgtcgtaggtgtgatttttgaaatatacagatcccgggaagcgctctcgagatcagagatacctatatatttgttcgaaccaatagcgcgaatatcaagtacgatgcaccgtaacttgaaaaggaggggctcgaggagtataatccgaccttcagccagccccaatcgatggggtttggggattcgagtgtttaaaggaccgctgcagccgggcaggcgagtcagatcaggtaaaagagaatttggaggaacacctttgcgaaagggccagtcactaggacacgacggaggacaatcgaagtcccgagaaaaagggggcgcacggaataataggataagagaagccagaacaagaagggctcggtagttagatgaagtcaataaccagaacgacaggagcaagcacaacagctgagagttctgctgatggaacagaggaatagggatccttggggccgaaggagtctggtcagtttcctcaaaaggtttagcgtgtgttttatggggcggtgtggtgtggagaggggcagctgtgtcagcagccctccacctcccaaggttgggggtcagggctgggcagcctaggccctgggacaaggctgggaactggagggctggtgatttggagctggagagagctagggctggagaagagagctaagtgatgctggagtagttatgtacattcgtaccttttgtagggggcttgcatacaaaaggtacattcactgagatatatacttacacctgcactattacaacctttctgccctcaaacgttagtatcccctgtctttagcgcctaggaatggtccgtgcaattataagacagttctgattttgtcggttccctttgtgacatagcactatggagtatataatgagtgacctagttagtattttggaaaatgcaatcggtactatctttttctctctcacctagacatggggtttctctttaatcatagccatggcatgaatggaatatgctatatatactacgagttgttccccaacatatttctacagtaatagttacaacactacataagacattgaggaagcggctcattatggacctcctcgctcttatctgacacattgatcttctacaacgcttgcttttctcatgaaggagttagatacatgtagtcatgtaggttttgctataattctatgagaaatcctacggacacacccccgctagctacttcaggtatctccaccgctggccacaattatcaataatatatatccctacagtattctgaacacccgcgccatgacaccattgaagtacctttctatacctatttagagatcacctgatctacactataagataatctagattaacaagaatactagcagtctttatatgtcttttcataggcataaaaaagtacttcaatggtgcggtcgggttatagtgatctacacaacatggtggacaattgcggccggcggcggatatacccgaagtagctagcggggagttctatactcgaatcacgtgactcacgggggcaacaactataggctcttgaggatgactctgtatttagatatagactctactgaaattctacttttcttctgtctcgaatttaaatggaatatcttccttctattcagtttgcgactgaagtacgtgagataattgcgctctatcaatcaatctccagggctggtgggccttgcctcgtccaaacctgacgtgacatgcaccgaggccaacccatctgctcaacctccttctccttcctttccccacaaccttcatcttgcaaaggaccttacctcatttattaattttctataatctcttcacggaaagttccttgcaggatttcacagccatcgcgcgacgccattgatttcggcgttccattcatcagcccggcgcagacccctctgaaacccgcatcaatggagggcgagcccttgcccgatgctcccgatgccgccgatgctcgaatctcccctacactgcaattgcagacgactactgtttccgagttccccgcgctttctttgtcaccctcgtttaagctagatgaaggctactcggatgatactcgaagccaggccgacaaagacctgggatcggacaatgttatggcgcttccaagttggttgctcgcccagtccgagaccggtagagctggtaagattaccctattccccttgccccctgtggtaattgccacgagcgcgaagcatcagcctcttgctcgtcactttgcgattatccttgctaactgagggttcacgactcccagaactcgcatacagccttcttcggtctttaccaacttcgagcatcgcggcagtagttgatcgactcaacccaatcttccatattgacccatgtgtcaggcttcccccggaagtcacatggcaggtttttacctacctcgacgcccggacgcttctgaatgcttcgcttgcatcccgctcatggcgtgaacgtatccttgactcaggtctgtggaaattcaaatacatccacgaaggttggggcatggacacgggcgcaattcgtgcgtttgaacaagaacattccgaggccatgtcgccccagactcggaagtctcgcctacgacactcggaaccagatctcggggaacctaagcataaaaagcgcgtgccgtcgacctggctcaattcccgaagcgatgaaaaccaaaaaccgaccgtgtttggccctgcactcccggtggccgacagtgaaggtgatcaccacatgactgatgatgacgatcagactacaccttcgttcgccgacgacccggagttgattatgccaaccagtacctcccaatctttttcgccactgtacccacctctacgatcgcatcttctcattcgggataccgacggaagcgccaaggtcaactattttcatatctacaagcaacgcaggcggctcgaagcaaattggcatcaaggccgatacactaatttccaacttcctgacccgtctcacccagaggaggcccaccgggaatgcgtatatgcgatccagtttgaaggccgatggctagtcagtggcagccgagacaagactctacgagtctggaacctggataccaaacgactatggcatcccccgctggtgggacatataaagtccgtactttgtctgcaatttgatcctcgacccgaggaagacatcatcatctctggcagcagcgacaagtctgtcattatatggaaattctccaccggagaaaagattcatcaaatcgaagacgcgcatcttgattcggtgctcaatctcaaattcgaccatcgttaccttgtaacatgttctaaggaccgaactgtgaaggtatggaaccgccgagctcttttaccgaatagcaaggattatccgcatatctgccatggatcaggcgccacatatcctacatggataatagatttgaacacgattccaccgagtgttctcgaagctggcattgcgcatgatcaatacaaagtcctagagccttacacgttgcttatgaccgtggaaggacatggagccgccgtgaatgcaatgcagatccatggtgatgatattgtgacggcgtctggagaccgtgttatcaaggtctggaacatccggactggtgcttgctccaagtccttgctgggccatgagaaaggcatcgcatgtgttgaattcgacagccgaaggatcatcagtggcagcaatgataactctgttcgcatctacgatcatgccaccggagccgaggtggcgtgtctgcgagcccatagtaatctcgtccgcacccttcaagcagggttcggtgatgctccgggagccgatgaaaccttgcgtgaagaagcgatagcgtgtgaaactgcgtttttcgccgctcaagaggccggattggacgtcgacatgggtcatcgggagcaacgccgcaatggttaccaaccgaacacggcgggatcgcgggaccctcgtgatatccctgctctgggggcaaaaattccacccggtgggggaggtagtagctgggcccgtatcgtgtccggttcctacgacgagtcaatcttaatttggcacaaagaccgtaataacaagtggacaacggatcatcaactgcgacacagtgatgccatcgccaattccgctcgtgcgaaccttagccaagtggcaagaaacactgttgcggcccaggcccaggctcagcaattgcaagcagcacaggctctagcgacacttgggcaaaatcccaatatcaacccccacgctggtcgtgccaacccacaatttctgcctcctctggttatcaatgccttgccactcgctccacttcctgctcaccatcatcaccaccatggccatcaacgcagacctcaagggtcctcgacagctgcgagggtgttcaaactccagtttgacgcacggaagctcatttgtgccagcgtggaccctcgcattgtgggatgggattttgcctgtgatgatcaagatatcattgaggcgagtccattctttaaagggctttaatctttccttcgcctttacgctttttaatactagcacctgttcttcttttacttcagtgcatctcctgcatcgtcctcactgggcgcgaattgtgagccttccaatgaacagacggctcaattcacttgacgatttcctattattagcatccatgcgatcgcggtgtgctttctttgcctggtgcattactccttgctctcccgcttcctctgtctctctccgtgtcctcttgtcctctccttacccatcttctcaatgtcgtgtcatatacatacgatgggcccttgctttccgtttaatggtgcatttcttatcttgacttccatattaggagtcatttctggctatccaggtcacatattctttccagagtttttttttatatctcttcgatctcattattatctttcttgcatggcgccggtgtggcattctatccatagcattatgattagcatcaatcagaaaccttcgactaccaagtcaatatcattttatggatatcaagccacggcatactcgcctcggtttcaattggaagtaggccctgacaggtgctgttttatagtactgcggcaccaagtgctgcagcactcccgcagcactacagtaccgaaccaagattactcaggtagggcggtcaaccgatcgcgtacccaatcctccggcagaaaacggaactctcttacgtaagcaacaaaagtggggccgagagatcgacgccacgacccgctccccacttggcttctatcaattctatgcaatacaccgttccaaatacacctttccaaaatggcaaagagaaatcgatcagcttcaccttccaacacgccacatgcccaacgagctatacgtcgattagcaagagtatccccgcccacagcaccccgcggactgtcaacactccctacagactcactgaccagcttggagaaaggcgcccgggagcacgtcgatacagttgccttcaaccctcgatcaaccggaaaggcgtgacccttcattcggcgcacagttccaactgcgggacaactatcgctgtgtgataacgggtcaactgagcaccgatcaatgggagcacgaaggggaaccagtggtcacatgctctatatatggtgggctatatattggtgggacccagcagaagtaacttacctttgtaaactccccattacaatctgcctctacttttttcttcttcataatagcaactatttttctcgtcgttctcttcctcggcaaaatgccatctggggattcagctgtaagtgttgatatctccaatacctctctgtcagacttctattataaccatcatcctcattaataatttgttgggacgtttactgatagataaagaggcccccattctgcgatttctgtcgccggcgtggcgatgatgaatgcgacttctattacgtcgcgcgtaagacccatatactcatatcttaaatagaggggagatgttaattttaggtgacgaagcagactaaagtcccaaaccccgtaagctacgctacggctcccgctcgaaagaggccaagaagggcatgtcgtgttattttattatatcgagctacccagtctatgatacctcgcacttgcctcttacttgcctaaggggcctcatataacaccttttgcgtttatctcttggccaggcgtatccggagctccaagagatacatcaagcccctggatctaactgtatatgtatttccctgcgccacaaaaaatactgtcagcgaaggagattaatactcttcgcaacgggatcactcttcgagactcggtacatacccagcttggcaaatttacaattgccttgaagcctaccgtaagcaggcaatgatctactatgaaaccatttatactcactcttcttattaggacatgggaaatgagtacgaggtaaagacttgcaagtgctatcccgggctgatatcccaccattcccccgatcggcgcgtccgatttttaccaaacacagagtataagattccaagccccgcaattctcgatgcgcattggagagtgtgcgagatcttcaatgcatctgcgatgggagagaccattgaacgacgtcttcgggagtgggaagggttgagaggctctaaatgcgctattattagagaggacggtacgaccgatctcgctagtctgctggatatcgcgctatggggccaagtttccacatgaatacacgctttacacttctgtattagtatttggttaggtctgagccaatcttaggtttatgaagccaccttcaattaccatgttcaccactcttcatgtgagaataccggtgatcgatcaaagaaaggcaaggcacatctcgagcccactttcgatattggatctgtacaccattcaggagtagagaagcatacaaaattctaatcagggacgtactcaaatttactctgaaatcaaaaagcggcaagaggtgagcacttaaatagaaggggaaaggtctcgagtgccaggcattgtctggtacattccattgtagcaccagatgcaagatatgaaaatgcatttacaatgacatggcaagggtgcaaggagataaataaaaacatcaaaaggtagatacctgcacctcgttagacttactgatcatagtatatgtaaccgaaaaagaaaagaaaagaaggggttaggagccttagactgcaggaaaaagaggggaagatacgtgcctaggtagcttaggaagactagcagggatatcagtaaattagtaaattcctaccttttctgcatgcaatttcctgttttattttccctcttcattctgtatccgacttctaatattcgcaatgtcaagcgagaagttcaccgttactgagcatcttgtcccgggcagttatattagagaatacccagggagcaccgtcacgcaggaagatgtactgaaaattcatgtcaaacaatatacccccaaacacgaaggtcccgtcccagctgatgcaattactttcattgccgctcatggagtcggtctcccgaaggtgaccctgtctttaacctgataattcgtctcatgtgctcaacattggacacaggaactgtacgagccgctgtgggacgagctgctggaacgaactaatggcttccacattcatggcatctgggtggccgacgtcgccagtatgaaccagagcgggatccagaatgaggataagctcagtatggattgtatgtgcttcccattcgattcttgatacatctccccccatattaacaatttcctaggttcttggatggatcacccgcgagacctcttcttgatgatcaaccattttcgtgagcagatgccacgtcctctcgtcggagttggccacagttttggcgggaatatcatgtttgtgacgaataaccctctcaattttgagaattcaaagaatgagatactgatttctttttccagcacaaatcttgcctatctacatccacgcctgtttacaaccctcctccttatcgaccccctcattcagctaagccctccctcgatgggcttcggcaccgaccctccaggcccgatcaactacactctctggcgaaatgacgtctggcccagtcgcgaggcagccatacgtgccaaccgtggcctcatccacggctgggatcctcggtgcgtagatcgtatggcgaaatacttctttcgcgatctaccgacaccgctgtatccggatgtcgaggccgtgaaggcgcgctttgatgcagccgctgatactactgccactccggtcaccctagcgacgccgaagtaccacgagcttatagcgcaaatacggcagaacttcaatgcccgggacccgaccacgggccggatcgaaatcccacgagccacccatgccgatatggacccattggtggcatctattcccttataccgaccagaacctcgaagtacgttccgccgcttagggacactccggccttcatgcctgtggattgtgggcggggcgacgtttttgaatgtcgatgagattcatgaaggtgtcaagatatgcgggtcaggcatcggcgggagtggaggtgtgtctgagggaagagtgaaagaggttatcttacctggattggggcatttgatgccatttcaggagattgggactgttgtagggccatgtgtggcctggttacagcaggagatggatcgattccggcagatggagagggagtggggagaagagaggaaaggcaagagtcatctagtgctagagaagaactggtataaagtcttgaaaccaatgcctagtggacgtggcaagggtgggagaaaggaaaagttgtagatactagatggtcaaatgtctactttttcaattttatgttatcgagatatcctcgtaaaacccaacaacccttgattatccgtctacatctccacagatcgccttacattagcaatcaagtgaggtctagtgcacacgattgatatgtcgctggatgtatgccaaggccagggtggtcctggagaaacccagcagacgacatggcgagatcgacatccttacaataaccccgcttcccacaccgtttgaattatatctctcattctaaccagaagtttcacatcagctctttcatataccgtccgtttaccgtatgtaactttatatgtatgttgtagatcccaaacaaaacgtacattttcattggtccgtagcaagggtaccgaaatgggggaggttacccgacatatgcatgcaggtgacgttttgattctaaaacatttgtaatattgaatagttgaataatagttgaataatagttggataatagttttatatcctttacatgtatttttacccaaagatacctcggatcggatttcaacgttccgtccgacccaaattcgacggaaatttactagaacaggattggggcgggtgacctagcaccagtcacccgccttacaccgtattaccgccccaatatttacatgtacatacaacatacatggcccactacatggcccactacatggcccacttggatggaaatttcatacatacacgctaaaaagagcagagataaaaatcttttaatttaaacctcagtcgtattgtcaaaactagagaaacttgaaaagtactaggcatcatggcagtaacaacgaggcagaccaaaaacatccatggacagcccccaggttccacctagcgtcgactatacatcgaaagaccccgatttccgtttaggatggcatgtgagaggctttggtgtcgccagccacggctacaaatataataggtcatcttccaattttaacatgatattgtgtacacctttctcccatattctctgagttgaaatcgttcatcaaaagcaccatgctcaccaagtctgtgacctccatcctccaagggattaccttggcagccaaagaatttgagaacaatgaagctggtgcaagagaatccctcattgctcatagtagagctctcatatccgcccttgaagttccgagcgagtttattcaacacactttctggtctcaggtaagcctgatttggcggggtaagactcgaaactattgctgatgttcatatagccagcactgtctgctattatcaggcttgctgctgatgtcaatatgtttcaacacttgaaagatgccgcgggtaaggggatagattgtgaagctctgtctatgaagacgggcgttgatgccagccttctatcgcgcttggccagacatctcgtggctatgaatgtgattacgtttcaaaatggagcattccatggcacagacctgagcgatagccttgccgccgagaactatcaacactccatccgcttttgtcatgatgtgtccaggccctcgttcaatgaattcccggaattcttcaagagcaatgggtacaagaccccgacgctgagtggaactgatggtccattccaagctgctcataagactgagctcacctttctgcaatggcttgtcaacacacacccctatctgcagtattttcactcttacatgagtgtttaccgtgctggaaaacaaaactggtgcgacaccggtttctaccctgtctcagagcgtctcctttccggattcgatgcctctgtcagcgatgttgtgctggttgatgtgggcggtggtcgggggcacgacctcgagacttttgcctctaaattcagtcctcttccaggaaggctcgtgcttcaggatcgagaacaaaccattgctagcatgccggccgatgaatcccgccaatttgaagcgacggctcataacatcttcacaccgcagccggtcaaatacgctcgggcgtactacatgcactctgttccccatggcttcggagacgaggatgcaatcaagattatggcaaacctagtgcctgcgctggcgaagggatactcccgagttcttttgaatgagattgtcgtcagcgaggagaaccccattctagcggcaactaatatggatatgattatgctggcccacttggcagtgaaggagagaacagaagctgaatggagatatatcttcacccaggcgggattaaaggtggtcaatatatattcgtatccaggcgtggcggagagcttgattgaagcagagctcgcctaaacgtcaccaatttctataggttggctacatatcgaggaaatcagaatcagactcggaaacaatataggaaataaaaacccgaatcccgaatcggcaaatctaggcttcagcctcggaaggttagcgcatttaaattttcggttctgtggggccggcggccgcagccctactccctacggtatcccaagtttaaacctgtaacaaaaacgcgttgtttacggagaagtccgaactccgtaggtaaaaatccttctgagggattaaaccggtcattgtgggggtgtagatcatcaaaagaaagaaaacgaaaggcttttcgctaaaattcccctgccggagtcctctttgattggactacagtgtagtgctgcgatgaaagagggagagagttgtatttccagttcttgtatttcctgaagttggtgcctgccgcaccggactgatggtcaggtgacctccacatccaacaatcttaaaaggccgtccctcccctgcccctctgacttcctttgggaatcacccccccattcccattacctattagttttttttctattttttttttttttaaaatcagcatcatggtcgaaattctggattataccaaggctttagaagtactcaaggagtatcctggagatggcctccacgtcgatactctcctcgattcggatagtcatggagctttgacttacaatgacttcctgattttgcccggttctatcagtaaggcaatgaacattatctcataggtcgttctctctaatcgtacgaacagccttcccggcatcggatgtttcgttggaaaccagagtaacccggcggttcaccatcaaggcccctctactgtcttctcccatggacactgtgaccgaacacagcatggccatccatatggctctcctggggggtctgggtgttatccacaataactgcccacctgacgagcaggctgagatggtgaggaaggtgaaacgctatgagaatggcttcatccaggaccctatcgttctgtctccggagacgacagttggagaagcaaaggaattgaagactaaatggggattcggcgggttcccagtgactggttagttggatttctccttggtggctctttttctttttgtttcgtttggtgatccttaccttgtttcgttcatagaaaagggaaccctccactcgaagcttctcggaatcgtcaccagccgagatatccagttccacaagaaccacgaggatccagtcacggctgtcatggcgacagacctcgtcaccgcaccggcaggcactactctcgccgaagccaacgaagtcctccggagttcgaagaagggtaaactgccaattgtggataaggatggatccctgatctccctgctctcccggagtgacttgatgaagaacattcattaccctcttgcatcaaagcttccatccaagcagctgctctgcgccgcggccattagcactcacgacgcggataaggtccgtctccagaagctcgtcgatgccggtctggacattgtcgtcgtggatagtagccagggccacagcactttccaaattgctatgatcaaatatatcaagcagaacttccccgacattgacgttatcggcggtaatattgttacccgtgagcaagccgcggcattgatcgctgctggtgcagacggtcttcgtatcggcatgggcagtggctctgcgtgtatcacgcaggaagtcatggccgctggtcgtcctcaggctgcagccgtacgcagtgtatctgccttcgccgcgcgtttcggtgttcccactattgctgacggtggtgtccagaacctgggccacatcgtcaagggacttgccttgggtgcctcggcagttatgatgggaagtctgcttgctggcactaccgagtctcctggtgagtactttatgagcagtgaaggccagttggtcaaggctttccgtggtatgggcagtattgcggtcatggaggacaaaagcaagagcggcgctgggaacaacgccggtgcttctcggtacttctctgagaatgataaggtcaaggttgcgcagggtgttgcgggctccgttattgatcgtggctctatcacccagtatgtcccttaccttgttgctggtgtgcagcattctctccaggatattggtgtccagaaccttgatgccttgcgtgaaggggtgaacaatggaacagttcgctttgagatgagaagcgctagcgcgcagaccgagggtaatgtccacggcttgcacacccacgagaagaagttgtactcttcttgaatgcggcgtctctgttttcgtcgactgttgtctagagttccttccatctagtacaccagaccaaaagttagtcaatacactctttttgataatctgccataagcaaattgttgtcaagcattttgaaaagcctggaatagaaatctagtgattatacaagatttaaggggtacagagagctcttgaagcatattttttcaaagagtaaggtttatgaaattcaaaattcaaacacatctctacttggtcccttccatagcgtcttcaagatctttgtaaaacagccacttcgtctgcttgccgtacccttttgccttccaatcattgatagtcaaaggataaaagtccatattccctttcaaggtactatcatgagcaagaatcagaaatacattgtcgtatgcatcgagctctttgatattgtcgactgtcttcagcgccgcgtcgtaatcagaaggaagcacaggcgacaaggtgaaaacggattctgattcagacgaaagcggaatgtgacgagagtgagatggacaaggaagatatttggaaggccgaagaacaccggcatggtggcaggaatctccacccatgaatacgaatgagtccggcgaggtggtaacccgcgcgagggcgcctatatgaccaatggaatggcctgcggcatttagaagatagaaggatccgtcaccgaaatagtccagcgcgtcgaacgagcctatcttgatggcttccttttctgtcctttcgaaggagatttcccgcactttccgaccttggatgtccgaattgagattgatcgcgtccgggttagttgggaacccgggccagtggctgtcccggatgccaggaccgacgacgagctcggtagacagtgggaaagtggacgggtcgccgatatggtcaaaatgggcatgcgaccagataatggcttcgatgtctgtgctgcggatgcctagggacgatgcgtcagagtccagaatatccgagatgttgcgcgggttctggatggttgtctgtgatttgatcatggctacaacggatggcggaagtctttcccagtcctgtcgaactcccaagtcaaatagaacatggcgagtgccgactgagattaagaagcagtaagttggcgctgtcacctttctaaggcctggcagttcgggttgccagaatagatcaggtcgtaggtcaaggagtgttcctctgcgattattaggtcaattggttcccatggatacgacgaggtagggccttacgggtcgatcactcgcacatcgacggtcgatgatgaaggaggaatattcaagacaggtggaagagtgggcttgtctttgttactggaacctctctccattttcgcccgcttgcgaatcactgcttgtagtcccgtctgcttgaagaaccaagcattctcggttttgtagttctccgggttgacgatttgtatctggcacggaacaaattaggaagagcacatacctgaattgaagcaaagtactcacatcgtagttcaaaagcagtaccggaattaatttcttgatctcaaggatggcgatattcttccccagacaagtacgacggcccgctccaaactaaatctcaagattagtaagagtatgtctgacgtagacgaagtctagacccacagtcaacaagctattctccagcctcttacggtcttcatggctcagacctagccatctctcgggtctccattcgtccgcatcattaccaaaggtttctttatcccggttggccatatatgggctgattccgacaatggtccctgctggaagatatgtctcgcaaacagtcaaaccaccgccaggaacaactcgctcaaaaggtagacaaaatggaggatgcagccgtaaagcctccagaacgcacgcgtcgaggtacggcaaatctctcactttctcccacgagggacatgtacgagaaagaccattactgctctcagattccaggagctcatcttgcagacggctcagcgtgtcccgatgaactaagagattatacataattgtacgcatgacatttgcagtcgagtctgagccagccatgatattagagaaagtccaggctcttggggccctggatatgagttagccggatataaggcaagagatagaaatcgatcagcgggaagatttctttaccaaggcataacatcagggtttgaggcctgtatattgagaaactgggagagcatatccttctcgtctgaaacctcgtctttttcacgaggcgccaagcgctgcaatataaacttgtcgactacctttaacaccccaaaccctgtcggtgacctgaacaatgctataaacgggttcgtattacagaactcgtcaaaccacggaatttggcccatctgagaaagtcatacgcattagaaaccaacggtagcacgacgtgcacagagctagaacccaccacagaaactctcttcataaacttccaaatctcgcccaagattccattcatatcgcggccttgttcgaggaatccatatcgtcgagagaacgtcaatgtccccatcgaatcaaacgcaaaatactggagccagctccccagatcaaacggaacatcgttgctgcctaggaaccgaccatcgagctgttccaacagtaccgcgagggtttgatcgacaaatgactcgagcttcaccacatttgtcatggaatatagaggagcaattgggcttcgaagccttttatgaaggtcctcgtcttgggaattgaacaccgccggcatggcgcccttgtttggcgtgtagggcttctgtgtgcgataaaagtcgctctgggggtagcgatgttagcgattgaaatccaatcatgactgcacgcaataactctggtactaccatcactgaccttgggaaacccaggcctactagggtagatagccgggatggtgcgaggatccgagatagagaccatgtttggaccgaatcgaacggcaggcccatacacagcatgcatccgacggtggtattcatgagctcgtccggactttacccaccacacgcgttgcaggtttgtgaactttgcaaacaacggacctggtacatcttgcagatgcaagtatagacaacaaacgtagcgggtgagatatagcacaacagcaacagctgtgatacgtattatgatcagatagtccatagtatataagtttatgtcttgtacgtatacttgtgctggaggattgagaatgaaaatgaaatagactttcaagattgagatcaatcgtctagtatctattaaccgaatcatattgctattgatagaacaacaagctattggcctaaagggacagagtacatttgcacacacctcgcctctttacacagctggattgagttcgtatcaatacagtttatggaaattagatatttcgtaatctataggcagttgcctaatttgtgccttagtgcatctccacctccaaatctagaatgctcccacatatagccccgcgctactgcgtacacctcacgcgaatcgggtctatacataataacactccacaaaaagtgaagcggactaccccgcgtataatataacatgtgcgtgacattcaagcctttgcatatcttactgcattgtatacctgctccactcgaattcgatatcgattgttcgggcgatcgtaataggatgacggctggctgcccggtgtaggcatcttagtctacacctgcatatgggttcaagtcgataagactcaataggtagcccgacggggttacgtacgctttgtgctgatcgggaataacataccactccacatcccactccgcaaattatccataggtgaaataagtactagagcggcatacttcttacatgtaacgcttcatatcgccaaaagtctggcctacattgccaagaatatacaatcggatccacattaacttatcgcgcatatcgcccccggcctcaacgcgcattatacgagaagcattcgtggcagtgttagaaagcagataggatctcccagaattaacagaatgaattgatttgcaatcgctcttctacctttacgaaagtatcctagataaaaaacacgaaatatatgcggtgtatacgggatcctaccagtgaacaagtaaagggcagtatatattaagaatggcgcccatagagcgtttttggttcgtatttccgcactattgacaatccgaaagggacacctggcgccgacaggggaggccgaatagagcaaattcaaggaagtggcgaaggaaggactttttgcgacattacatcaactctacaaggtttattccaaggttgctaccgcgtcagatgcgctcgaaaagtatgatctacttttcgggggccaatcctagtatgtaagctacaaactataaatgtaatgcaaaacgctccttccagaactgagacatcaccccacctctacgcaacctccaaaatttggaatggatgtcagcttcgttaaagtacgccgatcggcaggagatggttgatgcgcggaacatcccttgcgggccgcataaccgtaatcgtgcccaagccggagacgggccgggcccgggcatcccccacggggaaaaacgtaccgccaataccgccttactgaacgcgaattatagaacctttctagaacggtacacaagctgtacgcaagccgtttgtttcgtgaaaaatagcattcttattttcttataaatttctaaacctattgcttattttcttatgccattaaacagagataattataatgcattcagtgattctgctggcaaaatatcatgtaatctatgcggtgtggggacacggagcaaatacatatgtccgctgcctgcaggtatgtgcaaacgagttcagaaaatggcatagaactagataatgagacccccactttcagttcagtgagataagagaagatcatcaaagcgggaaaacaaggctcgggagatggatcaatggcgcgggaggggtctaggcgccacgaggtctcatgcatcaaaatgcccaaagattccgggatttagaccattctatagtccgctctgtactagcattacatgatggttattttcgtctcaccttctgtattgagattccaactccggagggtagtatgtatgtatgagcatgacttcccaaatcatgtagtaaggctagatttgaaggccagcacaccactatatagctctagcaagggtttgtggtcagcagagttgtctacttagaacatgggagataaagtaagtttctaggttattgctaaatagtttgaacaacacagccgaagcatctcacgacctaaatttcggacaatctatcagtttgtaatgtaacaaaattctgatttttaatatcttcaacctcagaggtttgcagcccatgaaaattgtgtgcttcgttgtattaattcagtaatttactttcggctgcctgcagaggctctagctggcccccctccgtaaataagagatggatagttttgtagcggactagccctctcgttttttgccttatatcaatcagacttatatcttctcccgaaccaagtttcttatagatctgtaaatatacgatatcctgtacgtgaagggcgtaccaggaacttattacattcttacctctatcgtttcttcatcgagtttcatatcatgtcattgaatacagagcattcaaaaggagaccttcgtcttctcttcggaccacaatgctctgaaattgaagactccatcgcccacatccgggatgccgtatacaaagattcagccggtctggggttcttatctgatattcttgacgagcttccctccttatggcccgtcataacttctgcctggccagccctacggaaggtgcagggggagaagcaactagctgcactggggcggcgttttgagaatggatctccagatagtgaagcagaaccctcaagtctcatcatgactccagtcacggtgatgaaacatctagttgacttttggaatctccaaaacgttgcgacacatccggcgtttccatcctcgccattatcacggaccacagccccaaggataatcgactcacaggggttctgtgtgggtattctggcggcaattgctgtggcctgctcccaggatacacgggaattccagtctttggcttcgaacgccatacggctcgctgtctgtattggggcgttggtggacttcgatgagatcgtgtcgggtaaggctaagtcaattgcagtgcggtgggagaccccagcggaccatgactatcttgaacagaccttgacaaaaagtcccaatgttagtttctcctcatggaaagaaaaggaaacaaaagcaaagagctgatagacattcaaggtttatatctcctgctatacagacgttaacagcgtcactatcactatccccggtgacactgcacaacgggtcaaattcaaacaggagcttagcggccgtggtcttcacacaaagccgatccccctccaaggccgcttccaccaccagcaaacacaccgcgaaggcatccagcacataatgaatctatgtgtgaaggatcctcgctttcaactccctcacagcaacgcgttgatattaccccttcgatcaagtcacaatgggcaggtgctcataaatgcagccatgttgcacactgttgccttggaatcaatcctctctgtcaaggcagactggtggggaacagtctccgcattactaaacagcgccgatatggaagttgacgagtcccgtcttctatccatcggccaggaagagttcgtcccacgatcagctagaggccgtctggtagccaggagcaaccttgatgtctacggggcaggagtgtttgctaacggtaacacgtcggctcgctccgcagtgtcgctgcagaacggcacgaacaccctcaatggtagtccacaggcagctgagatgccacctattgccattactggcatggcttgtagatattctaacgcagacaccacgagcgagctatgggatttgctggagctgggggtatgtacagtggagaaggcccctgggaatcggttccggatgccagacttgcagcgggagcccaagggcccattttggggtcacttcctcgaccggccagatgcattcgaccatcgtttttttaacatctcagcgcgagaggccgagtccatggatccacaacaacgcgtgttgctgcaagtagcatatgaagccatggagtctgccggatactgcggatggcagcacactgagctatcggacgaaattggctgctatgtgggagtgggatctgaggactatactgagaatgtggcatcgcggaatgcgaatgccttctcagccacaggaaccctgcagtcatttatagctggccgtatcagccatcatttcggctggtcgggcccatcgattacgctagatacagcgtgttcatccgcagcagtggctatccatatggcatgcaaggtacgatatgagactcccattgacctatctgaaagtgcaatggctgactgatgtataaatgataggccctgcaaacaaaggagtgctcgattgccgtggctggcggtgtgaatattctgacaaaccccagggtgtaccagaacctggctgctgcttctttcctgtcatctacgggagcatgtaagtcgtttgatgtctctgcggatggatactgccgcggagagggcgctggactcgttgtccttcggccattgcaggatgcgattgacaacggcgaccctatcctcggcgtgatcgctggctcagtcgtcaaccagggctcgaacaggtcacccatcaccgtccccgatgcagagtctcaacgatcgctgtatagaaaagctttgtcactcgctggggttgccccggatgaggtcacctatgtggaggcccatggcactggtatgtatcctgctttctttttacccttggtctcctctattctgccctcttctatttcgcctgcagtttagtaacaatgtcaaaggcacacaagttggagatccgattgaactggaaagccttcgcaaggcatttggaaacccgctccgaagtcagagtctccatgttgggtccatcaagggtaacatcggacacactgagacctcctcgggggtcgccgggctgttgaagacgatcctcatgcttcagaagcaacgaataccgaaacaggcaaacttcaggcagttgaatcccaaggtcatgcctccactcgagaacgaccgattggtgattcccgtagagtcaaccaaatgggcatcagcgagacgggttgctatggtcagcaattacggggcatcggggagcaacgccgcgcttatagtgagagaccacactcctagcctatcgggacaggggaaggcaatggcggaatacattcgagatatgcctatcttgatttctgcacggtctgaagaatctattcgggcctattgcggtgcccttcgcaccacccttttgaggcatccgtattccaataccgtcgtccgggaattggcgtacaacgtcgcaatgaagcagaatcgaacactgccgtttactcttaccttttcaacctcttctgatccgacatcactgagcacccgcttggaggctatcgccgcaggcaagtctgccgatattatccagaagcgggaatccaacgagcccccaatagttttgtgtttcggcggtcagaatggagttacttcgagcatttcacaagaactttacgacagctgtgtccttttacagacgcacctcatggcgtgcgagcaagcaggccagaagctcggccttcccagtcttttcccaactatcttcacatcagaccccatcgtgaataccgtttacctgcacttcatgctcttctctatacagtacgcatctgccagagcctggatcgactcaggactgcgcgtagaccgcatagtgggccatagctttggtcagctcactgcgctatccgtggctggcagtttgagtgttcaagaaggcatccgcctggttactgagcgtgcacgcctgatccagtccaactggggcccggagtcaggggtgatgctcgctgtggagggtacgcaggccgaggtccagcgtgtgctagagcagacaggccaccgtgctgaaattgcctgctataatggaccacagcagcaagtgcttgccggcacgggggaatgcatccgagcggttgaagacgctctcgctacaaacccattgacaagcaacgtcagggtcagacgtttggagaactcgcatgccttccactctagacttgttgatagcattgtgcccggcctcacagagctcgcagagtcctttgtctaccaagcaccagctatccccatcgaagcctgttcggcgactggcgactggtcgattgtcaccccggcaaagatcgtcgagcacagtcgcatgcccgtgcacttccaacgcgctgtcgaaagaatagctcaaaaactacaagttcccgctgtctggctcgaagccggctcagcctcgcctatcatccccatggtgcgtcgagtgctggagaaatcgtccgcaactcacacataccatagggttaacctcgatgggtcggacggaagcgggaatttggcaactgtcaccagcgccctctggggtcagggcgtccatgtccagttctggcccttccatcactcgcagcgtgggaccttcggctggatgaaccttccgccgtatcagttcgcgaagaacagacactgggttgactttgaccctactgctttctcgttttccggatcctccgccgaaccgcaatgtggcagtcaggagcgggctggcctgttgcgcaagttgagcgacggcccagaggagtatctatttgccgttaacacccaagatgtattgtataggtcatgcacgaaggggcacgcggtattggaccaaacattgtgtcccgcatccatgtatatggagatggtcctgcgggcagcaacttccgtattcaccttgggtgaatcctcaacgctgactatgtctcatatcgaggacctggtgatatcatcccccttagtattagatccgcaaggaagcgtgttcgtacgactgatcccagaggcagtggcttcttcccagacgtggtcattctcgatatttagcagtagcgggacgggtaatgagtcgtcgattcatgctacaggcagtgtatccttatgcaatgaaaggtccagggctctgtcacactttcagtctatgaatcggttgatggacccggcacgggcaagaggaattgaggatcatctggcatcaaacggactgaaaggatcgacggtttactctgccctcgaacaggttaccaattatgcagactacttccgcggagtgaggcaggtgtttgcaaatggccgtgaggctgcggggctggtcagtatggcaccgtcagccactgagaccacgtgcaaccccatcctcctggacaactttctgcaagttgcgggaattcacgtcaactgcctctctggccgcgaagcagaggaagtattcgtgtgcaatgctatcggggaaacgtatgttagcgattcgttgttcaaaaaggaagacggagctattccgttatcatggaaggtatataccaactacgtccggccgtccaagaatgagatcgtgtgcgatatctacgtgatgaactctcaaggagacggtcttaccgccgcaattatgggcgttcggttcatgagtgtctccatccgctctctcactcgcgcactggccaagctgaacaacaatttccctgacgtcccacaactcccgcccacgatccagccagcaattgtgacagccgattatgatgaagccagtgacaatgtaaatgtggatagcgaccttgttgcagtccaagagatgctttgcgagctgtttggagttagtgtcgaagaggtatctccatcagtctcgctgatagatatcggagtggactcgctcataagcacagaagtgctctccgagatcaagaggagattccataaggatatttcctattccaccttggtggatattcccaacatccagggtttgacagagcatatcttcccgggacattctcacctagctccttcccagattgtgatcaaaccagtacggcagcagacagtgataccgcaaactgtaacttctctgcctgtgccagctaacgccggaccgtcgctagtctcagtagcacaccaatgcttctatgagactcacgccgcggtatcccacacacacaatgccgactgggccggcttcttcaatgccatctatccgcaacaaatgacactcatcacggcgtacatcctggaagcattccgcgccttgggctccccgctagagtccagtcaggcagatgaggtccttcctattatttccgtcctacctcgccacgagcagttgaagaagcacctgtatacaattttggaatccgtcaacctcgtgcgccaaactccaactggtcaactcgtgcgcacagcgacacccatctcgccgctctcatcacacgccttgcatgcccagatccgggatgaacaccctccatatgcactggagcacgatcttctacagatcacaggctcgcggttggctgagtgtctgaccgggcaagcggacggggtatcgctaattttccaggattcccagactcggcgcctggtaggagatgtctatacggactccccggtgttcaagtcgggtaacctctacctcgcacagtatctcacggatgtcattcaaactctcggaaacggtcggcaggttaaaatcctcgagatcggggccggcacaggaggcactaccaagaatctcctcgagcagctctcggccctccccggaatggcgacacgcatggagtatacattcacggatatctcgccatcgcttgttgcagccgcgcggaagaagttttccaagtatgatttcgtacggtacgaaactattaacgtggagagtagccctccctcgctcttgcacggccaatacgacattgtgttgtcgaccaactgcgtccatgctacccgaaatctcgtcgagtcctgctcaaatatccgcaagctcctccggcctgatgggatcttgtgtctcgttgagctgacgcgtgacatattctggttggatcttgtgttcggactcctggagggctggtggcggtttgaggacggtcggaagcacgcgctggccactgaagatctttgggatcagacgcttcgccaatctggcttcgagtgggtgggctggacgaataatgaggctgtagagtcaaatgctctgcgcgttattgtcgcatcgccgacgaaggccccttctgctctggagatttgctccaagccggcaaacatggaaactgttgtttggggcgaaagaaatggtctgcagctgctggctgatatattttatcccgacgtggttgacaccacgcagaaacgacgagcatgtggtaagttcaaattcatcttttgtcccttgtaataactccatttcatactttcatttgctaaccctcttcagctctgatggttcatggaggtggccacgtcatgctatctcgtaaagacatccgtcctgcccagacacagacccttctcgatgccggattcctgcccatcagtgttgactaccgcctgtgccctgaggttagcctttcagaaggccctatggccgacgtgcgcgacgccctaggttgggtgcgccgcatcctcccaaatatccccttgctacgtccagatatccgaccggacggcaaccaggttgtggctatcgggtggtccactggtggtcatctcgcaatgacgctggcttttactgctcccgctgtgggtatcgccgctccagaggccatattggctttctactgtccaaccgattatgaagatccattttggtcgaggccaaacttcccctttggacagactgtcgcgtcaaatgatatagagtacgatgtctgggaaggcgtgcagagcgccccgatcaaaggctataatccagcgttcaaggaacggccactagggggctggatgtcaaccagcgacccgcgtagtcggattgcattgcacatgaattggacgggacaaaccctccctgtgctgttgggaggcatgcacaaagagtttcgcatacctgatgaactacctcgtccgacagacgaagagattcaggcagttagtccaaactatcagatccgcatcgggcggtaccgaacacctacgtttatggttcatggaacaagcgatgaccttgtcccgtgcgcgcagaccgagtcaacatataacgcgttgacccaaaacggcattgaggcagatatcagggtggtgcagggagctattgaggtcttgctatatctacaacatccagaacgggcgagaaaatggatatgttcgggttcactaacgctggagatttgacaagttggaacacgacggtgtgccaataagcggccctggccgcaacaaggaggaagaaaacgaagttactctgtctttcagtttacaatctaagagtttagtaggctgtacagatctgcttttcttccaagtatcccatgcggtctgaacttcactaaatcataagacttgctttaaactaatgaaaaggacactttcccgtcctagaaatcttcagttccttcatcatctcctcaattgccttctgcccctttccttcaaaatacttcggcccgatatcgtgaatatgataccccttcggatagtacttctcaccctggtcgcccgggacaggatgaccgagcgcccaggaaacccacgccattggaccccatctattccaaaatgttggtttcacgtagtagggaagtgcgtcccaagatttgcggtaatagcggttgtttggatcgggttgcttggctgtatttgacaccgcgaagatcaaaggtcgtgggggtgttaggtagcggagaatgaatgtgcgggttattaggagggcagagaagacttttgtccagaatggcgttggtggttcgtatctagttgatgttagcgctcgatatttcgttttataagatcagatcttactattccacatacaacatagccttcctcagccggtcatccatcatgaacgaagtgaactgcaatcccaccggatggaataccttcggcaaattataaagcagcacagctgttgcctgatccgctgattcccgattctgagcatctggaaccatatacttgacctcatactcctgactccaagtatccacctcctcgagccaatgtattccatccctaaaccccgtcttacctgacgggagaatgtcagaactaatacctagcgcgtcacctagactcttccaaaacgttccaatagcacagcgttccaaatcacttagcggccgccactcgaatgccgcgatgaaatttacaggctggacggcaaagagcgcaagtgtgtagagcaaatctgtatcaaggatcttgcctgaagcttggtagccgctgtgtaggaaacgcgtgcgggctacagagagaaaagcccgttgcgaggtagggctattttctaccatttcgccgataagggcggctgtgtctgtatagcgcttgaaggaggtttctggtttagaaaattgccctgtctttatgagaaggtgggagattgttggaatgccgtaagtctagaggaggttagaataagaaaaatatagattggtgtatatatttgcgtacccgaaataaagcaaactgccctgctttcacaaacatgaatgggaattctagctgcgccgtttctttttgaatctggaatgcttcttcgtctgtcatcttagccatagactcgcgtgtcgggaagtagaactttttttgtagctgtttaagtcgtctatagcgcagcgaattgataagaagggggtacgcaatcaacaagcccactgcaaatgaaaaccattgcggcatggtattgaaaatagctctggtggttgcagagaacgagggagttgtaaagaaagatgtgcctttatccataatgtggatattgtagttttgaagggtatctcaatcccatatagaaagctctgatatttaaatgattactggccccaaggcccatagaaaggggctatttatgtgacgccatttacatgtaactagctggtcataatacaagtactgtagaacatcgaaattcaggcgggcttgaagcaaagcccgaattattcttgatcattaggtcattgtatactatccgtctctccttgcacccaattatacgcaagataaactgaaaaaaagacacgaggcaactattctatttcaaccgtagacccaggtatcacatgtaccgtggacgtctaaaacaaagatgatattacatttatcttattcgagattttccgtaactgttttacatctttgtattattgcccttccatatgtatgcacatctatggatctagtaagcattctgcaaaggatggagtcccgcggggttgtatcgtggggctaatcttatacccattgagtctcttgcatgggcctggctggccccctattattatttattcagatatactccgtactatacagtgcttctccaaaagtacatacatgtacggtaaatactgcccgcatattacctagtactttggtgtagatgcattggtgtagatgcattatggtataggaagcagctcggtcacgataggctccacggtagctctcgctgcggtaagacggagcattcctcgtcactcatgcacccgctccaccgtctatgttattctcatgcatggtcattagaaattcatttttctgatagtcaccataacgtggatacggcaacgtgggggcagaaaactgcaggatgatgcggcaatgtggaaaaaccgggtctcttgtagtacaggatgtctcccctagaagtgctttgtgctgcgataccgggtataacttttgatagttctcaaggacagcccgattttctagctcatctgcaaagtttttgagtttccgtctttgaaggatatttgccaatctctaacactttattgcatttcattcacaaacatggttggttcaatggagaaccctggttcatggggccttgcctgtcttctgatcagcacctcgcggttcaaccgatatatgccctactacacgatgatggccgctggtaaggagagcaccattccaagctctctcatgaataaagtattaacttgaaatctccgtgacaaaacagtatggtctaccttgattgctggcgctttaaagttgcaagaggatcccgccagtctctctgtcgagtacatcctcttcaaagccggcctgtgctttgttcactgcttgttactatgcggtgctgggaacacatggaacgacctgatagaccgtgatattgacgccagggtggaaaggacaaaaatgcggccgttggcatctggaaaagtctcaaccgtcgaggccctggtatggatggtcggtcagtattttctgtcggtgaaaatgctggacttaatattggataacagaagcatgtaagtctgacattcagtgtgataaaactccggccgcatggaagagcacaacttgattaaccccgtccatccctcttagatggggcttaatgctgcctttgacagccagtatcatgctgtatccctacttgaaacgacccgtattcagcagagtcttcatctacccccagtatatccttggcttggccgtcgcctatccatcgataacaggctgggcctcaatcaacgggcaagagcagtccatgtctgagatcttcacacattgcaccccgatctgccttcttatcttcttctggtgcctctatttcaacaccgcctacagtcaccaggacagcgtcgacgaccggaagatgaatatcaattctgcctatgtggtcgcggggcaacgcatccggttattcctcgccttcctgggtgctctaccactcgcggtgattccgtatgttgtgttgaaaatcaactctccctggctgtggttctcttggatggcggtttggaccgtttctattgtgatgcagattgttcggttcgattcgaagaagcttgaaagtggcgggcgtattcattgggacaactttctgttgggactgtggactaccgttgcttgtatagtcgaggtcggtctgcagaaagtagagttctggaacctaatctagtataaaatagtataagatattctaaattcattctttctaatttatagttaactagtgcagtggggaaagtcgggatgcctagtttagtggccttgtccttcaggcagagaaaacgaaagcctggttgtncaagtagagtttcggggagcaagtagtctagacggatcatcaccccaagaatgaaaaacgagttgcgagatgtttgtgtactaggagattatatgctatggtgtggtctatgtgatccctatgcttgctagctgaccccccgggatggttggtgttgttgtgtcgtcctcgtcttgcctgcatggccaggctgcccatcgtgcatttccctcttcactatctgctttccactttgcctatcgtgcatttccctcttcactagttagttagttaattccccataataattaatatgatcacctgatctatcaaacatgaagctattcagagatcacccgatctagcttacttgctcgtttgcttacttgcttactgtttgcattcaatgcattgtttacattgtttgctagatagctaagcaagatatgcggtatttgcactgtttgcatgcaaatagacagctatatatacaggcttcctcccactttgcaacttgcttcttctttctctccaccattatgcctgctaccaccgaggattctaccatgctttccattgccactgccaccaccgaggatttcaccatgcctgcccctgatcttgcaactaccaccgaggattccaccatgcctgcgataccatagtaaatggtccgtgtatttgaaaatggagtgccaagagtgaccttgcctaattaggttagacccatgccaacagtaagaatcttacttcatgagaggaaaggtctttaattgactgagtgagacaaaggttgatcgactgagaagaccaagcaggtttatttggtttcagtacttcttataccattattgtttaaatggctggatcaaggattatggatcatggacaaactattttagtactgagaggaagaaccacagcacaactatctagggagagaaaaccaatctagatatccgggtactataaaaatttgagttgaacatggtaagtgggatcatgatgaaaccttgagccttttggaagggggaggttgggaggtcgactgatcaggacaatgctgtccttggagaagtttcactatactgtgttgccctcctcgacgagccgcttggagagtatttccgtatactccaccctgggcgttgacatcggctcctcgctctagcagtatctgtgcgattgtatcgtgtccactagagcaagcagcctggagggcatttccgtaccgtccacactaggtattaacatcggctcctcgctctagcagcatctgcgtgattgtattgtatctactagagcaagcagccaggagagcatttccgtatactccaccctgagcgttaacatcggctcctcgctctagcagcatctgtgcgattgtatcgtgtccactagagcaagcagcctggagagcatttccgtatataccaccctgagcgttaatatcggctcctcgctctagcagcatctgtgcgattgtatcgtatccactagagcaagcagcctggagagcatttccgtacactccaccctgagcgttaacatcggctcctcgctctagcagtatctgtgcgattgtatcgtgtccttcagtacaagcagcctggagagcatttccgtaccttctaccctgagcgttaacatcggctcctcgctctagcagtatctgtgcgatcttatcgtgtcctttagcacaagcagcctggagagcatttccgtaccctccaccctgagcgttaacatcggctcctcgctctagcagaagttccacagtcctatcatgtccattcaatgaagcccatatgaccgggtatattcctgtatcatcaggtgtattgacatcacttttatccccaccaagtattaaatgtacctcctgttcatggccattgaatgctgccagatgtagtgcactcattacagaagtttctctgtatggtctgactgtcttccaaaaaatgggaaaccacattgagaacggtttgtcggtcatgtcgtataatcgatgcactcggtaggtttctttttgggttgaagtcaaacccatctttcgtacgtgatcaggccaatgtgctgctgaatattctaagaaacttcgagtataggggcgcgagtcatcttcatcatattctaaatcctccatcaataagtatctcaaacaaatctcagccatctgatcttccgcatcagtcaggctgttccagtatgaaggattgagattgctggaattgttcttcgctataagaaattctctggctgtttgatggatgagataaattttcgagttgttcgtaaagacaaataggccgcaccatcgccgaagcttgctgtccaaattaattggatctagcccagcctgtttggttgttggtgatcctgagctagtagcaattcccaatgccatagccatctctcttatggtcagaggacgccgtgccgccacgataatctctagaatcttcttgactctatccattagatcggctgggactcgacagagtatcttctcatatgctgcattcacagaaggcggaatcagtgtgatcaaatcctctgtaggccgaaggctgtttttgaaggtagtgcggatatcatcaatggctagatgtagccaaagatatgtacggtgtttcatttgaagcagctgctgttcgattcgatgatgaagctccgttgatagtggcactgtctcaactagttctctcactcgaatccttaccaccagatcaatctcatcatgaatttgatcattctgctcctcccccttgatatgtatatgtgggaaagaatcggtgattactcgaaagtgatcctgtatatgatcgtagggacgactggtgaccaggaatttcaaacaggttccctccgttgatgaagatggctggcgatgaaacgcttcaagcttttcaattaatcggcgctgatctgtttcacaacattcatcaagtgcatcaaatatacaaatcgtcttgcacgatatatcagctgatgttgccgctattaagatccgccaaagctcatcaacttcttgccggagcagcctcccattcttttcccaggccggaatggcatattgtaatagatgaggctgctggctgaacagttgatgaagtaccgaacatagtgcgttagagagattgttctgttcatcattgtctttgaagaaaaagtaacatattctcacagctggatgagaggtctctgagtaatcatcgattattgatctgaccaggacagacttgccacagcctgggtcagccgacacccagagaaggtcgttgcaattgctctcccaccaacggatatattcagagctctggaaagcccatcgacaggtgcccttagctcgatttgggtttatgttcttttgctccgcgtagttaacgatcttgaacacttggtaacaacggcgctgctgatccgttaagactcttgctttctcttcattgaagtgacgttcgtgttgactatatgcttgatcgaaacgatgttggataccttttagctcctctgagtagtgcttaggtcaatatttgctgacgtaataattataagactgcacaagactaaccagatacaacagcacttatcctcttctcggcctcaattctgttgagagggatcctcttcagaaggtctttggcatatgcagctgccaccatagctgcatacccttgccactcttcgttcttgtgtgaatctgagtagtcacagatacctcggatgactaggcatgggaaagtatttatcagtccagcggcttccatttcgaaacacaaaacgtctttttccgcggcaagccgatctcgaatcaaagcatccttcatcaactgatttccagaagcaatcaggccatagtgaatagcagggctatcttcgtcgtcggcccgctcactccgtagtaccaacgttgaaggatcaaccgcacatttagcacagtctgcttggtgatggataacttcgggaagaaacagcctatccgtcattggctctggccttttgtacttccgacgtagcctcatgttctttccaaaaatgccgttgatggcctcctcgagctgatgcccttttctctcgtattgagttcgaatgcctgccattgcagcgcgcaatatagctggtggctggttcagaaaccgtgcttgctgaaaactttggtcctggatcgacttgccaaaatcgtattgaaacacaccactctcgccaccgcgaggcgcactgaccacaacatcgcccaatcgaatatcatggttttcgcttggtacaccccccgccaatcccgaccatgagtccgattctgatgctgggaaaactactgagcatgttcgtcgctacactagccgcggaagctgttccatattcaccatcaggcaggacggcgatgacaacgttatgttcgcccatcctgcctaacgtatagtcgttggcatcgtttggtgacacaaagctcggtttgtcgtgctcttcatcgagaaactcttgtgcggcaatgtattccacgggtaaggcgcaaatccagcccacagtgtaccctgcaggatctgacatggcttcaacgcgagagaaaaagcccgaaaatcaggtacccgcgtgacctttcgaaagtcctgacgtgcggtgtgcaatagaggcctaagttatggggacaatatatgcggctgtgagtaaaggagaggggaggaggcttgagagaaggaagaaagccctagaaggtagagagaaaatgtttgcctaccggggagggggggggggggggcgtcagcctcatgatgtacacgatgtgcagcagcgagcggtaagagaaaagatgctattggcaggagccgtcttctccatcccctcgaagcaaagaaatgctaagatcagccttggaatgcactcatatggtccgtaatttcgctgtaaattacagggaaatacattcaggggggattatattgatgtccgttaaacaaaaattggcgctagtgccttgaaagtgggtcctgagaaaagaaaagcagtcgttgaagagggcgactaaagccacaacaacgaattggactcaagccatatctcatttggggctgtgtgcagatgccaagggactacgtgttccagagtcaacctataacccaatcatgtcacggtcctcgtcacctgagggggtcagtgcgcccgtcgcgcgcgacctggggtgaatctcaccctgatctcacccagcttctcaccctgtttatagtgcactcacccttctcgtccgggcgacacccacccgactacatattgactgcgtataagccacacgccggtaagttagtagttgggtgggtgaccaccagcgaatctctactgttgtatgtctgcattcacctttttctttatgattcgttcggaaacttccttttgccgccctagtcccaacttggtggcctgagctgttcctgatcgaagctgatcgcagaaaatagattcaccgtggctattataactgtctggtttggtcatagttatctcttccctaaggatgtagtgaagattctgactaaagcagaggtgcggaaacggatggctcgctgtaatggaaataaccacaattgaagagctctcccatggccgaacgcatggagtactggatggacccccactaagaaggaccccagcgctccatatccagggaaacgatctatactcttaggcctattgggttgttggttcttatattccctacgggggtctgatagacattaacatactaatgtttaatcaactactcgctagcaaactttctacttattaggtgcttgtctaatcccgtatatcgagatgaagggggtgagaaagtagcagggttcgcatggattcgggcatcagttaggcacacccaagtgactcaggatgggggctgcagattatagcgtgaattccgagccgtatgcaggtctgacgtagcaaaaccccataaggccgaatacactaagcccatgacccggtgatagaagtaggattttaagaaagattctccccttcttttcgcttgatagcaccaatctccctctgtgcatggggctttagcttgcctttgactcgttgttatctactttgaaacaaactagagccccgtgatcgaccggaaccgactacggctgattaatatcgacattgaccttcggtagcccaaaggcctggtccagtcctcttacaatgactgcgcagatggataccgaacccagaactcacaaggaatacgctgtggggtgggtatgtgctctgccaaaagagcagaccgcggcgacagccatgctggatcgaagacacgtcgggctcccgaaaccgccaaatgaccccaacacttacacacttggatctgttggcaaccacaacgttgtgatagcctgccttcctaaaggccagtttggaaacaattcggcagcgaacgttgccgcctggatgatctcgacttttccatctatcaaatttggcctgatggtgggtatcggcggcggcatcccacctaaggtaagactaggcgatgtggtggtcagcacacccgtgggccaatttcctggtgtggtccaatgggactttggcaaggcaaaagaaggcggcagcttcgaacggactgggtcgctaaacaatccgcctacgtctctgctcacggccctgacggcgttggagacggagcacgacttggttggctctaagataccggagtacttgaaggaattgagggagaggtggccgagacttgtacccaagtacctgccgtctgatttgcaggatatattatttaaagcagattatgggcatgcaagcaggcgccccttggatctcgatgatacctcgaatgttgacgatgtagatgaggacgaggaagagagctgccgattctgcgataaaacacaaattgtacggaagaaaccgagagatatgtctgtgtacttcggtctaatcgcatcaggaaaccaggtcatcaaggatgctgctctccgaaacaaactcaataaagatcttagtagccatctcctttgcatcgaaatggaagcagcggggctgatgaacaacttcccgtgtatcattatccgaggaatctgcgattatacagactcacacaagaacaaagattagcaggaatacgctgcggttgttaccgtagcatttgcaaaagaatttctggcattcttgcaaccaactgatgtcgagggagagcggccagtgaaagaaatacttgggcagggttagtcaactttaagatctttttactaatttggccgaaccccgctcttattagcagttcagaatgggcacgatgcagtggtgaagctactgcttaagaggaatgctgtcgtcgattttcaggatacgtatggccgaactccgctctcattcgtggccgagaatgggcacgatgcagtagtgaagctgctgcttgagagaaatgctgccgtcgattctcaagctcaatatagccgaactccgctctcctgggcgaccgaaaatgggcacgatgctgtggtgaagctactgctagagaggaaatcctagatcaaatcttcgaatcgtgaatattcccagtctccgacttctctctaacgaccaactcaggtgtgagggtattaatgataatatctttaatacagcagcacaaaagcgagaggagatgcgccaaagttgagatgaggcaggcttttaatgcgaacatacattgaactatcaccatggagattagcctcaaaggatagggtgtttctcctaacgtagttactgtaggatatagttgttgatttccatccgcttaaatactttcttcaagatgcactgtgatttatgtaaagaaaccacgactttgtcagagagcggttgattggttatgtttaatcattggattatcagttaaaacctttttttccagaacccgatcacaatattatcgagaagccaccgaccccaagaaaaaagatggggagaattctcacttccatcaccaggtcatgggctatggatttatgccacgtcagacctgtatgtaggggtcgaaattcacttaccataatatgcgtcccccacctcatcgcgcaaccgtcgcacggatctcagctggattatgttggaacatcattgggtggaccagtcaaaatgggtgacctgtgcaccctaacggtggcatccaaaagtcgacaatgtcacgtccgtctgatgttcagtagcgtgcccgttgccctgaaccccgtcagctaaacaaaagcagaatatcattcaattataccgttcccctgaaacactcggcatattggcatgcgcacatatatgttaattacctctatataccatatatcgtatttcctataggtgttctggggtgggcggcttgcttaccgaatacgataactgttagttagtgagtcctgttgaccgtggagcgtaatggaaatagacgtctgaattgtcatattcatatctcaacgaatgtgacgtcatgaaagatgattcaagccactatcttagtactgtgacttggttactcagtcaggcaacaatttgtggatcgatgtgattccgcctatgcaagatttgctttctagcgctcaacacagcctcgtcaaagcggaacagcctccctggattttttgacttaaacttgggtcattcttatacttcttatacactgagcttaatcaccctttagtacaatactactatgccgaactctcgtataacaagctctgatttatccgtctggcagtggaatgaaggtatatttctcaaatactctgttatgttacagtactaacagtatagaacatggctggcgcaaaagtgaagcccgtctggaagatctgcgaacagacaacccgacacgtccaccctcattgatttcagaagataccaaagtatatattatgtgagtccagcttatttggttggccccacaagaaaataaactaaaagtagtatgaacagaacgacaagcgcaaagaatatccgcagttctcgccagtttcatcaagtattcatggatgcattttgcattcccaaattctggtgggctgagcatcttggtaatgccaacggctactttggatgcgaagatacagatcatgtagggggagctggattcagtaagtctgctttatgtttgtccttgtgatataataaagggcgctcacactctaccgatactactagacacctgggcgtttttcgaagtcaagcatattgctagggacacgaagtatcactggtctaaaataaagctctttacacgatggctagagtcgactcatcagaccggcattctgctattcgacccaaccgataacctctcgactccactgtttgatccgaatctgacagaacttgatgacccattttggatgtaccccgatatattagaacaggttgttcggtttcaagaaggttcagtatggggcatccgagatcatgttcgagatgccgagaaagaacaaaggcctgcagacaaaaagcccaagcccaattacaggcgactccatgacatcgctcggcatgcaattcatgttaccgagtcactagatgtggccgtccagaacattgagcatctcgttcaacagcatgaaatttatataaaaagcatgcaagtggaacctcaacctaaatcccatcaacggatctcccggcggttggcattcttccagagctatatcggcagcatacggcaccggtctgtatcaaatcagctacgactccaaaacgaaattcagctggcattcaatattgtctcccagcatgacacaagtatcactgttgatattagccgtgctacgcggtcggacagcgctactatgaagacactcgcatttattactacgacattcttaccaccaacattcctctgtgcagtgttcagtatgtcattcttccactacgacgcagagtcgggctggggagtttcggacaagctgtggatatactgggtgtgcattatcccaacaattgctgcatcggcccttctctggaatttttggcccaaactatttccagatcatttttatagcgcatttcgagaagaggaaagcacagagctgcctacctttatttgaataaggactacttgcattgatagacaatatgttgtcgatttattatttgttcttttggagcaatagtaagtctccggcgaatcataaattgaagacaatcagaataactaaagctaagaatggtcgtccgtgacctatgacccttcctttattttcggaccctctgatgaaagtggcatcctaaatgagccggtcggtatacccctcaatagacgagctctcgaacaatggataaatggatctagtcgagactctattggaaatagatgagtctaacggaaaatcgtggtaatgcgagtgtaatggtcaatttatacagtatggcgaaaagttctctatttaactaagataatgcagtctttttgtatttggccaagtaatttagatgcagaggaatgagaagaccattgttttcggagcaagtgactagacttatgtacctcttttgaaatggcatcacttaaggcagaaatgctaagaagaacgggcgatgcgtagaattcctaggattaagatgaaatagctatggacccttagaagtttagtaataccgatcactcttgatggcttgtcttcggtttatgacctactgagcaatggcgcgaaatacatgacgttttacgatcagaaaagcggcgagaagtgagcacttaaacggaaagggaaaggtctcgagtgccgggtattattcggtacatatgtacaggacgttcgagttaatgatagaccatccagcaagtgcgttcatgcactgagcattcacaaaagaaagaaactagcaccacagtattattgcaaggggtcatggagatgcatatacttcgaatgaaagactaaacagcggcaggggtcataggggtcgggaacatgacaccgtacaaagatgagatccatgtctggaagccatggagatgagtattctcatcactgccctcgttctgagatccagcaggcgatacctggctctgcgcggttacatatgtgtcccgtgagctggttgctccaagcgaatcatccggctcatcatggctgcccgggcagcagaagaggaaagactgcgctttcacccacgacagaacatccggacatacgggcatgtttgtgtgagggccttcatttgcactgccgccgcagacagtcatcgtgaaaaccgactgcaaccgcgatggcctaggagggatgtggtcgccagttgccctcgttccttgggcagtagactccaccgaatttgtaggaccgtttgagctagccagattgcgcgacaagctgagaaatttattagctctgggccgcggtgggcgatttactacagcagggaccgggttcgatggagagggaaaatgtcgcctagaggacctggcgggaggctgggcacgcctgcttgggtttctcccaaagctatcctttgtgtgtgcaccttcaccataacgatcgtagcttgtatatgtggcttcgcggtgggcaacggaaagattgcgttggtggaaagggtggtcctgcagcggtcgacccatgttcatcccatgtccactttgtcgatgagggaaccggccctgtactagcgtaccattctcggctcttcctatcccattaacggaaatccaactagcatgagacgcagaagatggcaagccaaagaatctccttagggtgtcgccatacgaggtgccacgctgaccactagtagaacctccacgttgcatatttgcggatggccgtgcattgttatctgggatcatgaaccgcgcagagatgctcatagcttctgatgtgccgaaggagggaaggccagggggtgtaggcgatctttctggcggtggatatcgaggttggataatcgttactgcaggtcccaagttcccaggccatttaggcctacggatactagcatcaccgagggaaacagccttgcgatgtaaagacgggcggcggtctggtaccgatgtatttccactcaaaagaggtctcgaccggtgtgtggcttgccagtactggtcagataaaagcttggtgtgattcccaagcttccttgccattctctgtcgtcttccttgactggctggcacagtcatcggagtatgatcatcctgtgaatctgaaggaacgaatctggccatgtttaccgctaggccttgctcgtgaacggggttctcttgcaggagagacgcgtagaaacgagggctggaattatttggcgtggtgactctgatcgcattgtatatagatcgttcatcgcttagggtggactcaaatgagtctgggttatcgtatggcgaagtggagtcggaatcgcgaaggtgctttcctcgtcggaggctctgtgatgctgaaataaactgtgaatgagggttactagactgatcgattattcctcgggccatcatcttgaaggcaaaggagcgaagcctggtcaagataaaaatatactgggagagagtaatagacgggaatacccaaagaagagtatgtgatttccctgaaaaccctcatcgtgcctgccgagatcaagccaaaaaatattatacaaaacaaaacaatctatatgtacactctcaaatgaatatgcgctctaaacccgaaaacgttgaatgtcatgatcataatggagtgccacctgggctgggaattggcttgccagtcacctgggcgtgctcctttcttagggttcgcagcaacccttcaagtctgcgacgctcttcttgttcggcctaggaggtgttagttagaaaagagagaaaggcacaaagacaactcaccctcagtatcttcatgttctcgttgcgtgtgtcacgcatcatcttcttgaactcatttttgagcaccatggtagatgtcgtctcagaagtgccatcgcggccaacagatgtaggactactcaagttcatccagctgatacgttcttccgccagttgtgtctcgagttgctcgcaacgatcccggagagtgtcaatgaaaatttcgaagcgttcgcgttccttctcaaactcgatgctggcttttgtcatggcttcgtagtcatcgataatctcgcgaagttctctttcaaggttatccgcccgctgctgaagatcggcacctccgcggtggctcttcagagaggccagttcttcggtgagctcgatatttcgggtaaccagagcatcgttctccttttggacattagggttggaagccacctctgccgcgcgctcggctcggctaccataggcaccatccagctctgccttggccattgtcagttcagttgtgacccgcacaatctcgccttcaagttcagtcaactcattctgcaggcgagtgacgttctggtcggactgcgcgcgctgatcatctgcttccttaatgcgggcatcagattgaatccggatctgttggattgcggtttcgagttgagccacctcttgctctgcacggtcacgggcacccctgacctcctctgatctggaatcgctatcgttctgcagcgtttcaatgacgctctgtaggcgttggacctcgttctccgcgcggtcccgggcttccttgacgtcctcgcctttagcaccgtgctcgtcttgcagagacccaatgatgatatgtagacgcttggattcatcttccgcatgggcgtgggcctctctggcttcttcggtcttagcgtcgagatcattttgcaatgatgagatgaccgcctctagacgcttgacttcgtcttccgcgtggttgcaagcctctctagcttctcttgcttcttcactcttagtggcattatcattctgcaacgacgcaatgatgacctctagacgcttgacttcgtcttccgcatggtcacgggcctctctggcctcttcagtcttagtgtcgttatcattttgcaatgatgaaaggacgacctctagacgcttgacttcgtcttccgcacggtcgcgggcctctctggcctcttggctcttagcgtcggtatcaatctccaacgacgcaatgacggcctggagacgcttgacctcaccttcagcgcggtcgcgggaatcactgagttcctcggctttagtatcgttgtctctctgcacttcgtcgatgtattgttctaggcgcttaatctcggcctctgcttgatcttgggcatcccgagcatcgctaacttcgttagtcctggcatcagcttcgctgtgcaacgaggtaatgacgctttgcaagcgcgcgacttcgccctcggcctgaaccagagtcgccttggtttcttcctgagaagagccactgtggcgcatttcgttgagctgcgccatgacaagagccagctcatcgcggttggcgttgttttcacgttcggatacttcgagctctttgcgaacttgggtcaactgttccgtcagttctccgatctgggcatcgcgttcggcatccgacttggaattgagctcgcgttgctgctggatttgcgtggttagaatactcttctgctcaagtactccatccactcgactttccaggccatctacaccagcttgaaggtatgagagttgttcttccagcccctcgccgtgagacgcatcagggggtggaggcaaggtgggcgaacgagtcaaaccaaaccgatcaacaatggtttgcactcgattgttgatttcggtgagttggtgcttccaagcgtattcgacttcaggtacaatatcgcgagaagccacgggagcaggaacgtctcccctgtgcaagacgatattatccatgttattcttgatatagtccaagtgagcgtcgaccgttgctgtgggattgacaggccctccatcctctgacagctgcgggggagggtcaatggattcaccggggttgaactgtatcatcatgtcatgcatgcgcgcgctaagttcctccaatcgtcgttctgtagcctgcatggcctcggtattcattacgccggccgcgttcgtctcggtctttccgttcaagccaaagttatccaaattctcagttgtccggtagagactgcgatcgtcgaatttgtcataggtgctatccgaagtgctcggagcagggctcttacggcccttcttcagacccttgtgtgtcatctgcaagacacccgcagtgtgctccagcaagcgctggcagatcgtctgagacctcttctccaacctccagagttcctgcgccaactcctcacatcgtctctggctgaccgcgagttcagagtcgctcttttcgagggcctcagaagccccgctgcgaccaaatatgccccggctcatccggttcgagttcgaaccaccattggtattgtattcgccgctgctccgtggactgggcgggctgtagagcctaccgagagactgcgccgcgtcacgcagttttgtttcgaccgtcagtttccgcttcgtgccctggatgcgaatggaaagtagtgtcatttccttcttcagctcttccacctcttccaaggacaggacttcgtaattcgtgctatctcctatcgcggtctcggtcaacatgtacatcgccacggggtcgttggcattaaggagagccgagcttcgcgggtgatccggattgagctaccaaaaacaaaggaaccatggtcagctagagtccgggttggtgtgttgtgtcgctactcacagggttgtaccgcgaccggtcctcatgttgggggtctagagtatctcgatacccgtccactagtgtctttccaagcggcggcaccggacctggagcatcggaggcgtttatgctcatattcgatggataccgcgagtccccgtaggaggactggctggagcgcatacttgaattcatggtcgttcaatggccagggtccctccaattggaattcgtaagagaaattcaggaacaggcgtcgggcatcatgaggccctggagtttgcgatcggagagaaatgtagtaggggtcactatgggttaggggaagagtggagagggatctgtatttagcgaaggcacggagtagctaatattaaaagatggcggggagcaaaggagaaaatagacgatcggcatcaccttagggttcagccacggcaatttactgtgtaagatgttcgatttgtattctacacgtacggcgtagatatcataaatttacagattcaaggttcagattcatagatttagatgtatggagtcaatacccctgaatacgtatacgagatccaaggttggtcattccactttctttgtcttcagaggtgattcgtttagagaaatccactatattgtacagatacattctactagacctactgtgcacccactgtgctatatccgacgactatattagttggaaactaagataagccgacctcacttggttcgacgatcaaccccgctgtgtatctccagtagtacttgatagtacttgcgtaatgcagcgtcatagtagggctgctcaggtaccgccaagtacccggttgcgtgtacctcggatcccccagagtcacattgaaaaagccaagagactaaaaggatgggagaggccgctttgtttctctttctcatagaggcccacacagaatgaatttggtctgtcacacttcgctgtggacatgtcgaattttggctcttcagataccgagcagggctctcgacctacctacaaggtctataagcgacgcttctggggcttagcccaactggtattgctgaatattgtcgtcagttgggatgtatgcgcgccctcgtgatcgatccatatatcgatttcgcatgtcgctgacgctcgtaaacagtggttaacattctcgtccatctcgacaacggccgcggagtacttcgatgtctcggagagcgctattaactggatgagcactggctacctcttcgccttctgcgctgttagcccgtaagtagacatgaatcgcctgttttgaaacagcaaaagaaaacaaaaatatccgctccaagtatcccacattcactaactatactcccagcatcgtcatctggatcctgaacaaaagcagccccaaaccagctatagtcaccaccgccgcactcctgctagtcggcaactggctcagatatgccggcactagagccaacggcggcatcttcgggctcgcgatgctcggccagatcataatagggttcgcgcagcccttctgcctctgcgcaccaacccgatacagcgagctctggttctcagatcaaggccgcacgagcgcaacagcggttgccagtctagcgaacccactcggcgcagccctcggccagttaatcgactcagaatgggcgtcgaaaccctccgatattcccaatatggtcctgtacatcacgatcatcgtacgtgaaaccccatcccaaaaacttaaacctactcacccattgattcattctcgctctcgctcaccatgtaaaaacagtccaccgtcgcatcaatcccatcattcttcctccccgcctcaccaccaacaccagcaagcgcatccgccgcaaagccgcacacgcccctaggcgccgcagtgcgcaaactaatcaccacgcgggaattctggcagatcttcatcccattcgccgtatacgtgggcttcttcaacagcgtctcctcactgctgaaccaaatcctcagtccgcacgggttctccgagacagaagccggcatcgcgggagcgatcctgatcgtggtgggactcgtcacgtcggcaatcatgtcgccgataacagaccggtacaaacactacctgggcagtatccgggtgctagtgcctatagtggcagccacgtatatcgggcttattttcgcgccgggcagcgcggcgggaatcccgccttcatatgtggttatggcgctgctaggcgcggcgtcgttcgctatgctgccgattgcgctagaatacctggcggagattacttatccgctgtcgtccgagattgggagtaccatctgctggacgggcgggcagttgcttggtgcgtgctttattcttattcaggatgcgttgaaggctggggctggggctgcgccgccgtataatatgcggaatgcgttggtgtttgcggctgtggttgctgttgtggctgcgccgtttccgttgacaattgggcttttcgggagggaggttcatcgtcgaaggtgggaagttgatcgcggtgttgagatgcagactgtcgcggatgtgtctgggaccgttgatcatgttaagagggttaggtctgatgattctgccgtggatactgatactctgatcaagacatgagagaatttctgtatcagatttcttttgggatgagcgactcatccatctcagttcggaagagctgttgacgctttgctctttttatttattatgtgccataatgcacttgacgagtctttatttgatgtccctggtcagcccgagttatacctcgtccatattaccttaatacatcatgaatctatgaccacccacagggacttgagtcgatacatcagtcttagcgaattaagcatacttgtagataatctgaccacgacaataacgagccgagttatatgaatcctatagtcggatatggctaagcctagtctaccagagcacaatgcaatctagacagatgagattcgttttaaaacaagagaataacaaaagcacagtttgaacaggcggaagaccagctatctgtacacgcaaggctgagagaggagggcgaatgatctattattctgtttcttcctctgagccctcctccctgccttgaaaacacaatacatatgcgaacacatacacgcaaggaacgaccaaaaacatgatttcacatttctagatcgatcctgcgttctcaatccaaggcggcaagctaccaggctatcagtccgccttggcagccatcataaaaacgggattggtttttcttccggcgtttcggtccaagagtttccccggtatcaatgcggtggagagcgaaggttattcgagggccggatcgatgcaagggttggatggaacgccaaaatcaagactcaatggaagagtcgtttacttcagctccttccagagcttaggagcagcgcaggcagtgacgcagtgagtgaggtggaagactgggttttgttagttgcacaatccggactcgatggaaggtaattgcatggtttttctgaatccatcgttgatgtcaattgcacttacactcctcgacgcagtcctccttggggcccttgtagtcctcatcctcctcctggcgggtgacgcgctcaacgcactcgtcgtagtggtgcttgtagggagcgcagacggcggagtgggcgcactctgagagtgatagttagtctctgatcgagatggccggtggaattcctctttgcaatgccattggtggttttatcaaccacgcgcggatcctgacacataagaccaattggtacgaacaatagcctatgtccaacgatcgcatgacagagacgagaataaaatgcgaataagaatagtaaaagtcaggaaaagaacaaggtcactcaccatcctcgagcttgggcttgatgtcctcgggctcttcatcttcttcctcctcttcttcctcttcttcctcctcggcctcaccctcctcagcctcctcggaaggctcctcttcggtgtcggcctcctcggtggactcgctcgaggcggaagcggactcttccttctcggtgggctcttcctgggtggtctcggtttcggtgtcttgggcgggagcctcagcctgggcctcggtgaaaccgaaggaggagacgacgtcagagaaaaattcggagagacccattgcgacagagatcaattgaatgatgaccggaggtcttgtgtgggggtggaaaagcggaagggggttgtaattgaaggaggttgttggttttgcccaagagctgcttctttcggactggaaaatcggaaaggcccggccgctgagagacaccaattatgccgcacgtgattggccaatgggctccaacgccattcaggacgtgacaagtgcagtttgtgaggaagtcagtactagagttattcctgctggatataaggatctcggaggtacaggataattctactattgttcgttgagacccaacgttggcgagcatataaactcttcgtttctccatttctaagtgcggaagcaccgctttcgtgtcgctaattgctaattgacggggacataatgtacataagatagagaatagaaaggagccaattcaaatatgtgatagaaggacatattgaaatagattcccgaaaactcaggtggcccgtcgtagcctctcctccagctcgtgggctacactctgcgactgaacctcctcatagcatggaggcggttccatgggttcgttgctagtgtcagatgctcgtctgttttctgactcttctggtgtctcactgggtctagcatggctaggagtagggggagcttcatatgcaggcagctcttctagatgaactgctgagagatccacgttttgtcggccccgagtgctttcgcctgtgttctcaacagcctgctcgagtcgttccttaatccgttcgaagttggtatggaaatcaaaggctccgccctccttgaatgtcactttcaactgaacggcaggcagagacggtgaaatgccacccccagatactggttgtaccagagctgtccatacattgggtccaaagaatggtgcagatacatgtgagtcacggacattcaacaggggtgacgagaaggactgaaagtcatcgcttctggatgcgggaaggtagacaacctgacgagggttaaattggtcgggggcatggacacggatgaatactgactctttgattggtgaggtggatgcagccagcgctgctttggactgaaagtttctctgtgcctttatatccggacggtggagtcaaagagacactagtacgaggaggggaagagtagatcaaacgctcgttgggaagacggacgaagccctgatcatcaagcattacccaactaggcagtcagtatagaagctttaagttacatgggtctggtcctggccggccccggggagaaacagctatggaggtagatgcatacttgagagccatgatttggaatcattccagtcgcatgtgacactgtttttaatcagcccaacactcaggagaaatggtggtcgggttgaatgccgaccttcgaaggtgtaaggtgtggatattgcggggagggatcaaagcaagatctgtagatttccccgaagacaagatcaaaaagccaccctttcagagggtttcaaatgaagtgcagacttacaatatcaaattgagggaagtggaagtggaaaggcggggcaagcgcaggcggggagataaagctgaagggcaaacttcggcgttgcacgttgtacggggaaaccgatcacttttttcttccactctcaaatacacaattgtgaaaatgttttccagcttcgcagtagttgtggcaatgaaaatctcgaccccgcaattggcgagacgagtcaatgaatgtagctaagttgtctcccgcggaacctgatccgtctctaagtcagcataatgctagtcggctaagcaaaatatcaatgtctcaaaacaccctggagactctctgatgtatgtgggctcaagtttcaatattagtgaagctggcatagcttttggatatgcaatatttgacgagaattaacaagatgccggtcaagttagtaaaagccaggaagaccctgtacacggtatttataggaaagttcggctttccctaaaggttaaagacgaaagagaagaagagaagtaaaagaaaagagtcattgttgtatagtatactacttcctacggagtattccactgtctatatagaacacatcgtctccaccgtgttgagcttaatgcttcgcaatacgcttggctatagcatccaggtcgatctcatccaaaaacctggaatacagtagcctgacgctttgatccacccaacactctgcataaatgtcttggggtgtttgttggaaagtcggaatgatctcatactggggatcttatcttgtcgcaaatgatgcaagatcaggcctgtgctcacctagaaggggctaaccatgtacaacatagtcaagagtttttcttagtgtgactgatcatatcaactcaagtatcatgtaatatttggaatttacacagagagaacaagagaataatgagttcaaagttgaagttcaatcgtagcattgaacttgccttgttccagcatgtcacgttctagaagcgtccgagtcaaagcgcgcgctaaggctcaaacctttcagtttcgcatttcagcttttcccctcttcttgcgcttctcccttgatttcatgttctaataccctgtctatcggatatattggatagttcgtgctgatctgaggctcgaaatagccaagtaggtggatccccacctgggcaagctcttccggttagccgtactcatattaatctcttcgctagggacttcatgtcgagatcataaccctttcccgattctttcacgattctttgacgatccctcaacgaccctcgagtcttctttcctccgaaaaattgcccatcgggcttctacggcacaatgggagaaaagggccagtacatcccacccctcgttgggtggatgtatgacttggtcctatggtcattctccgtgctcatcgacctcttcttccgcgaagtccaccctagaggttcatggaagatcccccgccgcggccccatcattctggtggcagctccccatgcgaaccaggtatgccgctcgcttccggtcatacacacaagatactaatggatgttcgcccagttcgtggattctttggtattgatgcgcgtcattcgcagcgaagcgcaccgtcggatctcatggcttatcgcagaaaagtctttcaaacggaaatttatcgggtttctggcgagagcagttggaacactgcctgtggcacgtgctatggacaacttgaaacccgggaccggcaccatctatcttcccgacccggtcaaccagccaactctgctacgaggtgtgggaaccaactttgaagggaaaggcttccaaaaggacggaaccattgccctacccaccatcaacggaacatcatacagtactgcgatcgccgagatcaagggaccagaggaattgatactcaagaaggctttcaccagcaaggatgcgctgacccagcttactggacggcaagacattgaccgtgatgggaatttcactggcgatgcatccgcgcaggatccagatttcaagggtaccaagttcaaggttgctccgcatgtggatcagaccgcagtctaccaggcagtattcaagaggctaggtgcaggcggctgtgtcggtatcttcccggaaggtggaagccatgatcgcactacactgcttcccttgaaaggtaagctcttcgtattcaagaggtacagcagatttactgacatgatacagctggtgtcgccctgatggctctaggcaccctggctgaaaacccggactgtggtctgaagatcgtgccttgtggcatgaactatttccatgcccacaagttccgttccagggccgtcattgagtttggtaatccaattgagatcccctcggagttggtggaacagttcaagcaaggtgaacggcgggagtctgtcggcgctttactggaaatcatctacggaagtcttgtctcggtcactgtcattagtcccgattatgacactcttatggtaagtttctttatatcttaggggatttgcttccgctaacaattcaaaggtcatccaagctgcccgtcgtctgtacaacaccaaaggaaaaaatcttcctcttcctatggttgtggagctgaaccgccgtcttgtgaaaggttacgcccacttcaaagacgatccccggattgtcgctttacgcaagtctattgtaggatataacaaacagcttcatcttcttggaatccgggatcatcaagtggcctacgccaagttcaccattttgcaggtggtggccacgttgatttatcgcctaggcaaattagcgctcttgacaatcgggacgctccccggtttcctgctctttaccccggtcttcatcgcgactaagtacatttctgcaaagaagtccagggaagcactggctgcttctacagtgaaacttcaaggccgagatgtcatggccacatggaagcttcttattgcccttgcatttgctccggcgctctatgccttttacactgctgccctcacttattggacatactggaaccgagtcaatggacttgttccagattgggtgccactttggtcgatagtggtgatcggcatggtactcttccccacagtcacgtttgcggctcttcggatcggtgaagtgggcatggacatcatcaaatcacttcgcccacttgttctatctctgaacccatcgtcggctaacacgctggtgaaacttcgagcgagacgcgttgcactggctcagcaagtgacagacgcgatcaataccatgggacctgagctattccccgactttgatgccgctcggattgtcacagatccattccgagatgcgagcgacaccgataccaaggcggacaacggactgccggcgatcagaagaaccagcgtgccagaacatggcgagaaaatgccctcgtcagagcccctcccccgcaacgaatccttccacaacctggccaacattggcttcttctccacacgacctcctagtcgtaatcgtagccgcagccgatctgctagcgcccgacctgggtctcggcacgggctgaagcctctcagcactctcaccccgaaagacccgctcgaggatgtcagttcacggatccgtgatgccatgagggagcgcggagaacgtcgtcggcgtcgaagcgaagatggaagctgggatatggccagctcaggccctggaacaccatccagcggtgatgagtcccgaaaagatctttgagacgtgtactgccttggccatttaatcatttatcatgtcgaccatcaaccatggtgtggtgttcggcgcaaatctgtgtacgtatttactcttatataaccatacacgatatcccttgttttttttttttttatcatgaatgctataggtagtgcagatctgctaaaatcggaagcctttggtatcataattagcagatgtctagaaggaggcatcatcctttacacgattggactgcacactatgcgacgtatttgctcgatcgacgacagcagaaagctcgatttctagcttggcgccacctgatcactcatccccgatagagatgagtaaaatatcgcgtaagtaatacttgttttatagatgaagactgaaacctcggatcagccaatgcattaagatattcgtattggcagataaataactactagaaaccagacagatagaaccgtaatatatcatactttaagactatacgcaccatccgagtgtgtcaaccaattacgaagatgttagctgttgcccagagctgatgttgaccgattcattttcgcctcgccacttccactgggctaggtgaggcgcaggagcagaaataagcccataggatctaaaatcgcacatgaaaatggtgcagcctacgaatttaattacgacgcctcaaattgttcgagaaagtgccggcaaagactttcatcataactgaccacgtcgcgtttcgtagtacaaagccaaatccggccagccgctaaccgtgcaccttttatcttctgctctccagtttctaccccaacttcttgtttttttctgcggagtttaggggtcttatcttcttttcacatatccatcatgccgggctcattgcatatgtcacgcctccggaactggttcctcgcctctccgcctgccgagtacgccatcacaagcctcaaggaactgctgatcggcgcacttcaacagggccctatcccccagcatgtggcctttgtcatggatggaaacaggcgattcgcccgatcacatggaattgagacagtggagggacataatctggggtttgaagctcttgcaagagtgagtgctacattttggcagctcggcgttacacggcagcatccgtcttgtggccgaatctaacgactgatagatcctcgaagtctgctataagagcggagtgaaggtagtcacaatctatgcgtttagcattgaaaacttcaaacgctcaaaattcgaggtggatgcgctcatggaaatggccaaggtgaagctgtcacagatggctcagcacggagacctgctcgatcgatacggagcaaaggttcgcgtcctcggccgtcttgacatgctcaaacccgacgtcttggaggctgtcaacaaagccgtcgacatgaccagccgcaacggagaccgcgtcctgaatatctgcttcccctatacctcccgcgacgagatcgcctcagctatccgcgagacggtcgaggattattccacgccgatccaacacggtcactccacggctgctgcttctcgaaatcccttctcggaatcccatatcgcacataatatccgcgcccagacacacggctcgacaacacatgaatcacacagtgattctgagtctacgtcgggctcttcggggcaggatgatgacgcatcggttcaacacgaccacctcgaccgagtctacggatcgatgtcttcctgctcgtcttccacaaccctccacctcggaaatcagcaagaccccaagggcggctcaattgcgactggggcagatagcccggtctatatctcccccgaaaccatcacacgtcagactttgaacgaccacatgttgaccaagggtactccacccctggatatcctgatccgcacttcgggtgtcgaacgcctgagcgactttatgctctggcagacccacgagaatacggagattgtgttcctcaatgtcatgtggccagagtttgacctgtggcacttcctacccgtgatgcttggatggcagaggcggatttccaagtcccggcaggaccccaatgcggaggggaactttgccggtgaagcaaaaccaagtgatgaaggactagacgcgatgctgtggcgtcaagggggaaaggtcaaagacatttagtgatttgtctgtttatataccctgtgtctacttgcttttgttcagcttcagcatcactggcgtcttgctttttgcggagtttctgttgggcacgcctgacttggtatcagcatatatctatgcatcgccgtacactacattggtcttcggtaaataaaatatcatttacttcctaatcctcgacttcctatacgccagatccgtacttggatgcccacatttgatgtatgagcataggggcttgcttctacggctttttttcttccacgaatcatggatcatctttcttatccatctctccttctattacttcgtactatagatcacaatacaaggatgtccttctgattgaaaacatttagccacaagcagcaggcggtaaaacccttttgatgtccaccccgcgccgataccggttcacgtgatgttgagtcaccgtataccggtcccacagagaagaacctccagttgaaccatccgaacatcatctatcataccaattaattcaaaatggttaagcaaatcgccggttccaaggccctccttttgggttcaggcttcggtacgccccgcgcctctcttccagatctcccagacctaaatgcgcgatgctgccccgcatcgagtttgtagaggcatacatttgctaatttctgatttctcatagtcaccaagcccactgttgatgttctcagcaaggctggcgtcgaggtcactgtcggtacgtccaattgaatccacacgaacgcatattgcattgaatatcgctgacaatgcggtaacagcctgccgtaccctcgagagtgcccaggccctcgcctctggcttcaagaacgccaaggccatctcccttgatgtcaacgacgatgccgctctcgacgctgccctgaaccaggccgatgttgtgatttcgcttatcccgtacactttccacgctaccgtcatcaagtctgctatccgcactaaggtaactattctctagaggagaggaagcgggcaccgtgctaattcactataatagaccaacgtggtcacgacatcctatgtttcccctgcgatgatggagttggatgagcagtgtcgcgaggctggtatcacagtcatgaacgagatcggtctcgaccctggtctcgatcacctctgtaagtgtctatgccatggattcaaacagaccgacgctgataagaaatagacgctgtcaagactattcacgaggtccacgctgccggcggcaaggttacctcatttgtctccttctgtggagggttcgttcgaccagtcccatgttgtatagcggatgtagctaacaaacaacagcttgcccgcccccgaatgctccaacaaccccttgggatacaaggttagcaaaagtcccattccaccaatttgaaagtaactgacgaatggctgtttcaagttctcgtggtctaggttagcaactgtccaatgctgagttttcgcttgaacaaatgactaactagctcagccgcggtgtgcttcttgccctccgtaacgccgccaagatctacaaaggtacgtgcttgattcactctaacaggaaccgagtattaatgcacaatacagatggtgagatcgtgtccatcgacggccccgatctgatggctaccgctaagcccttcttcatctaccccggattcgccttcgtcggctaccctaaccgcgattctgtatgatatttatgcattcaaacgctttggtttcagtcaactaatctttctagactcccttccgcgagcgctacggtatccccgaggcccagaccgttatccgcggtacccttcgctaccagggcttccccgagatgatcaaggtccttgtcgacatcggtttcctcagcgatgcgcctaacagcgtcttcgataaggccacttcatggaaggaggccactaaggaggttctcggcgctacctcgtcctccgagaaggatctgcagtgggccatcgcatccaagactaagttccctaacaatgacgagcgcgatcgtctcctttccggcctgcgctggattggtctcttctccgatgagcagactatcccccgcggaaacgccctcgacactctctgcgctaccctcgagcagaagatgcagtacggtcccggcgagcgtgaccttgttatgctccagcacaagttcgagatcgagaacaaggacggctccaaggagacccgtacctccaccctgtgcgagtacggtaccgccgagacctccgctatggcccgcaccgttggtattccttgcggtgttgctgttaagcaggttctcgatggtactatcagcaagaccgtatgtttatccgtatcccctttgctctcgagattctctatactcacttcattatagggtgttctcgctcccgtgacttgggacatctgtgctcctcttatcaagaccctgaaggaggactacgatatggagctcattgagcgcactctgtaagggtgcagtcggatcttaatgaatatacttctagtaaaaaatataggaatcgcatagacgatgaatgaataccaaagtgtgtatttctattctatattccaccaaaccatggtatacaccagttcaatgttcacttggacgtcctagtcattgtgggccatatgattggatccgaaggatccaattgccacattggcactcttttgcgtatctgcactgaggtgtatatattaagaaggcgtactacacgttaaagaggaaatgtgatgtttaacctgatttgggattgatttttgatctgattattgttcgtaattagtacagtgctgcggaaaacagagcttacacgggcttctttatcagaagcagaacgcagggctccattcatcttgctatcagctatgttggaaggatgtcctgggtgtttttcaaaggacacccgacggcagggtcgattcgagagtcggccatcttataattttcgatatgctcgaaggcccgaagctgccacaatggcaaacaaagcgcgtatccagcacgccatctatcaaaggagctcgagcagatcaaaacgtaaacttatcttcattatcatagacataacaccatttctcttatcatagcatcattgcccaggtgtgccccagcagaccccaacgtacaaccgcaagcgggggtctcacgggtggaaaagaaagacacgaagtgaaaaagaaagcagagcgaataatctagctgcttgcgctttttgcgatctttatctgtggccaattcacggagagagagaaagaggaaagaagtcttttcggacgtatgcattgttttttgtgtgtctttcatgccaccggtaagagatgtattcgatcagagaatactgccaaacctacaccaaggagaagaacgaggatgattagtaactgattccagtatcgcgagggttttgcgggaggttgagatctgtagacagaggccagattggcaaagaagtccagaagagagggataatccgaaagagatgaatgtgtagacaaaacaaataaagggggagaaagaaaaggagaaatgacatacccaaaagtctgcttaatgctgcgaacatagtacgtgtcccaattctgcttggtgacatcctcctggccaaccggaacaccagaccaagaaacacgcatctgagtaacaccatcgatatcattctgatcgaagttgatctcctgcgaactgaagtggccctcgggccactgagcaagacgccacttctggacgatctgcttgggctcgttgagcgtgacgaactcgccagtcacgtttccgtcaaagatagcgaacttgccgccaacagtggcgccatcgaactggcgcggcgcgccgcgcgtgaacgctgcgatgcgctgcgggtccgtgaaggtagtgtaaagctcggcggccgtggtgcggaactcgtccgaggccgacacggtggttgtgttgacggcgaccttaccggtcttggaggtggtggtcttcgcggctggggtgtcggccttggtgtgcgggtggacgacggccttggggaagccgctggaggggttctcgcccggggcgtgctggaggtccttgccgtgctcgttgatcagggcgggggtcaggccggtcagagccttgcggatttcgacagtaagctttgtgcgcaccaggtcctttacgggctgcttggagttggagtcggcgcggttttcaatctcgaactgcagacgggagtttacatggttagtattacagatcaccttggcgattggggaatgggtcaattgaacatacgacgtactcatcttcctcggtgtcgtgggctacctcgggaatgttgatggtgccggtgacatcctcatcgtccttggtcttacctatggaagcgtctcagctgccaggtccacaaagaaaacaagaaaccgagataaaatgaattgatattggactacaaacctgagtattctagcgagaccttgacatcgaacagagtgatgaccttgcccttgcgctggctgacatctacgtcgccatccatggacaccagcttgtctactttggctgacacgcccccttcctcgacactgaggccgacaaggttcttttgcaggaactccttggcccagccagaggcatccttgttgacccagtgccagttgttggggttgtgaaggaccatgatgaatgttgactaggggaatgaaagaaaactctgatttggggttggaaagtggatttggaaagtggattgcttcctgtttttgagaaaaaatattgctaaaagttctgttggaaattcctgttagccatgatctttcgcaatggatgaaagttgcatgtgtaaggaaaggccaatgtcaggtctcggggcgtatcccggacttgttaagcgttgtccgcaagtagatggagaatcatctctcagactggtgccagctgaagtctcttcatgtaaggccaattgagtgacgccgaggggcaggttggaaccccacacccctcgttgcactcaagagtgaacgtagtaaaagcacaaggtgaaacttacagttggtgtaatcaagtccaaaacatcaaggacatcaaggactctgaggtgaagtaaaagaaagaagagtcgaggggaaagagagctatttgaagggccgacggaagactctagaaggtgcacgtgactgtggataacgctaacgatttctctatcgccattcttcttcttcgctaccagctgtattctttggatttctatatttttctagttgaaaggagctaggatatcatcaagttctagggagatagaccctcaaccaccccactttacggtaaacgacgttattttcgcatataggctggtcatttgaatataagtatccacaggtatcataccacatggcgctcctctacggatggttcgactatggtttgcttgcttgcgatttgcgatttgcatcttccctttttttggtagattgtctgctagctaggcgagaaatcgatggtttcatgtttgcagaagcggccagctatatataacctgtttcagcaccctctctctccctctctttctctctccgtcttagttattttcaactgatgcactctttatgatctagcacgtcacacctcgtactcaggctaatctacatcccaaagtatgatcgggttgctgatctctgacaggtctataacacccatggatatgtgcgtgtcatagtagttatgtgtcatactatatcaatccctctccctcccacaaaatatcacgccttgaagatagtaactgaatgaacgttcactatggctcgacgctcttatatatcttttcgcaatattttgcgactccgtgatccacccagggtcgaaccggtcgaacccaagaggtccaagacactctggaggatcccagcagaaatagtggaaatgatcttccagcttctttccgatctagaccgagcttgttttgcactgtgttgtaagaggccgcatgtctgctatgtctcacataacaaacaatatagaatatctgtactgtcgaaattgcccaggacgttactacttcgtcgccttcaaaacgaacgctgggtatactgtcatagatgtcaaaatcttcaccagaaccccagatggcggtttcttagctggaaatgtgatccccagcccgctatatccgaatgcaatgcttggtgcgatgtccaacacgatgacagcgttgacatatgtccatgctcgagtatcacattccaccagaagcaacatccaattgagtactttcgatctcaacaggagactttagaaaaatcagattatcagaaatgatctgggacatttacacatccatgcactgttgagcatcctctggcatgggtgactatcctaactacagctcggttaaacaagtctaccaagactttccaggtgggaaatcagttggtcttccagacttctaaagaaacagcttcgtcggagctcttccaaaagatcggctctagaccaagcaggtatgaaaccggactttggctaaaggacttcttccatgatcaatccaacttcttcattggggatgagagctctaactggtatcaatgccatggctggagcattgcaaagggcaagccgtataacttcaagataacgctacatagagacctaaggggcgacaggaggcctagcaaagggtgggaagacaattgtcataattagatgtcgtcttctagattgctctttttgctagccagccttggtttttcaatttgtattaacttccttatttcaatttcataatacttcttatgtgatttgcatagaacatgtaggtactactaattagctaactgccagctatatattctttaagatatatattttttccggctgaaatatgtatattcaactctcacatccctgaaggagaccgaaaactcaagtgtcgcaggcactgcctcgcgtcaatctataacgaacgtatggggatatcacgctgccaagtacatagcaaagaaaaatcacaaaagccactcttctattcctcctattcctccaattgctccaattcctcccagccatcttcactcataagctgttccttcacccgttctctcaatccctcgatctggctccctagcgcctcagtccactgaccctcaacagtagcgaccttatccttaagatccgtagtcagagccagctcttcatcagcactcgtctcctgcatttccctcctcacatcttcctccgcctccccacgcttaatccgctgcgcctccaccagcttctgattagcccgcataacagcagaccgcacctcatgcaacagacacagcagattcgtctgcgactcaatgaactggtagctcgatttctctgcatgcgacagcagcgtatacagatactgcagcgggtgctcatggtagctcgggttttcctcgtattcgtctgcgggaatctgcacccggaagccgtgcaggtcctcgggcgcctgctgcacgagagcgaggagggacggggcgatatcccagaatgcggagagctgcacctcgacacctcgcatgacgttctgctcgatgacgtccaggaaggtctcgagccgagttagcgcctcggtttcgtactggacgcggcggtcgagtgcgtcctgcgtgaagaaggcttgtgtctcccggagcttgtcttcgtttttggtctgcttgtaggggagtaacgcgacggctttgtatttgtcgtcgcggtcgctgattaggtcgaaggactcgcggtggagctgctcgcgggcttcgaagagccattttaattgcgttagtttttcgaggagctcgggcttctcgtcgccttcttcctgtgtttgatctggtgtcccgctttgtgcatcgtcggagagcatgctactcagctggtcgatgcaggttgtggctctgttgattctgtcgacgagaatggcgtgcatcggcttgagtactgtttcttggtacgtgtctagctggcgtttgaccattatcctttctcgctcgttttcttcggcaatcattgctgcctcggcctcggctgcttccgcaaaggtgagactgccttcttggatctggctttggatgttcgatcggaagtggcgatggccctcgtcgacttgttgttggtgttcttgaagcattcgctccacgtcggccttatatcgatgtctggtggttttgatctccgcgagatcagtaattgaccggacggtggttcggtgagtaaccaaatcaggatggctgttattcacagcaggatggtggcggggataaggcggaggcagggtaatcaaccgcgagatatctaaattgcggctttcttcgcgatacccagtctcgatggaattcctgggagaatcttcaggccagctgactttctcaggcggatactcatcagagccatactccgtagtcgcataattcatgctcacatctttgggctgagaaggagtcaactcctggtcccctagcatggcctcccgaggcaatcccatgtacttcgattcccgcttggatcgttgaacccgcctctcacccccctcgccgctggaaccggttgctgattcccaccagcgacttggtgcacggcctcgggagctctcctcgttgctcatgttaaggctggcaatcggcgacagacaaggctgatagttattccaccacgcagactccggccgacctgctcggttttgtgggatatcaagctttggctggggcttgggcttgggctttggtggttgcttgactggcaattcgaaaagattgcggcgcacatcctccacttggaaagattcccagaccttggcgtatcgctgacgccggatctgagattcggcgagcatgtagtccgcaaatattttcagtgcttcagtatcatcctcggcactggcttctttatcaataaagatctcgtgcctttgaatcgcatcctgcaggaaagcaggatcttgtctaaggatcgattccattgacacctgcgtcgtttgctgtcctggcgttcggcgtgccgataggggtttcattatcgatacggcatcgttaggcatatggagaatatgagagattggacggtcttccggtccccgggatggtgcacgggagcgtgagcgtggccggacctccttcgctgaattgagagggggagtcggtagtgcctttggtggtaccgcttgggtggcttctttgggatatgttgacgagcccagcccatttggatttggcgagaatggaggcgtatgtgcaaatgcagtcgagggaccagcagagctaggtagttgtctgggagtcgtgtagggtgattgctctgtaacgacagcactggacgatgctcgaggccgcgtggcaaaatgttgtccttctgatttaatgctgcgggtacttccaggggtttgattgtactttcccgacgtcggatgccgatcttgacctggactactggtctgttctggtagaatcaggtttgacggtttgatttgctcgagagcatcggcccaaggattaccatttgacgataccgcacttgggggttcaaagacctgactttgccggttacgtcgttcaattcgcctttcacggatgcccttcgcactcggatcgcggactgctgggctgcggaaaagaccgccactaccgggagttctttgattcgatgaatcgtggggatctccatctgtcggctctggtgccttggccgcttttgccgtgtcaacatataaattctcggttggtcgactgttcaaatatccctcgtctatccagtcagctggtgtaggagggatgcttcccagtcctgttcctagcacgggaggtccccttcttgtcgtcctgttcgagctctggggcgttctcagagatgattctgatgagccactcacgctgacggaccttgcagcgggaggaggccctggaggtggcggtggaagtggcatcccgggctcccatgtactatttgacggcgatcggtttcgcgactgactcgttgcccttgatgatcccgcactgcttaccacagccccagcagatgcggctcttcgggatccaggggcacgcgacggtgtctcaaagtgagcaggtgttagaggcatttgctcgttaaagccgggtgacggttggccctggtcatactgtgcgagccgaggcctgagactagctgcagcattatattgcgtttggtcattatagggcatgccatggtactccactcgaccttgagaaacagatctactcgctggatgtccctgcgggggaggtggaggaggtagcgactggcgctgagaccccaagtcagacgggtaagccatagatagcggccggggccggtttgagcgtctttgatactggacaggcatatcaaacccacccgccctgttgtccggtggagaaggcgttccggcaaagttagaatttggctgaccagaaaagtccggggacgttcgattttggttgctggggggtgagtatggcggaggaggtggagacagcggcacatctaccaaagtatcaatatcacttcaaacgggtcatgggataccactggtctgcagaggcatgagctgtgagcgagactcacccggattatttctttgcggcgtcacacgatgcatagcgcctggctgaagatacggggcctgcgactggggcctgcccggaggaccccagtcctggggattataaggaacattgtatgcgttcctagacgccatggaagacaatgaaaccgatctgctgttaacaggcgatggaacagcaggcgatagactgtgcgtaaacgggctcgaaagcgaggttgacgatgaaggcgtcggtgttagtccaagaccctggtattgagggccgctcaatgctgttgtcaacaatggcggctgtacagcatgctctcggcgaggtgacgactgattgctaggactcgcagctgtcgacgaccagccggggtaatggttgctcagcggctgctcgacacctgcatgattcggacccagccagctagagagggaggatcagtatatagaaatacccgagaataagatgggtcgcacctattcatattgggctgtgcatccatttaggaggcccgttccgaagccatggccgcctggaatgaaagaggataagccaacaaaacagaggaaaagctatcagcttgaaacaggcgagacgctaaatttttctattctttgcaactgcggagagcaaggttaggggaaacgatagcctagcctatacggaggcgtgctccgtacggcagagtctgaaggaccatacgatgtacgggaaatgagatctaaatttggaacggaagaaagaagaactcgatcgagaacaaatgagcgcaggaggaagcgggggattgttatgcacctgagggcattctcatcacattcgcggcccaagctcagcgcttatcgttctccatgagaggcccaacgacggtgtccccgcaataaaacaacaaaaagggcagggaatatctataaaaagatcatagtttcatacattttaagtagggatcagaggtttctcgaattcttattggtattttccattaaactcccaactaatgcagccttccataaaggaagaccaggatattatcatctgtcatgtgccgaggcaccaggagactgctccgatatcttcgaattgttctgaaaatcgatattagtgtcaagactaacaagcgatagcaagaaacataatgtgtttggacaaatttcagataaagccttgtcacaggcgatggtcgtcaatattaaatccttacgttgaccgtcgtgataaattgaagtgaatcatcataaaaggatgagggaagaaagagaaagaaagaggtcaaaactcacagaaagaaggcaaagcagaccgccattggcgtctgcaattattagttcgctaaattgtttctgttcgagatccatcagcgtcgagtactgaatggacattgcagcaatgttgagactcgtgaattgatcaggcatgacagtttctcgtcttcgccagcaagctgacttggacatatgcttgtcttttatgtcgtttcatcatgtaaagtcgggaagggaaggagacaaggtgtacatacacccacagtcagtcgagacaagagagctcttcgtagttcaaggagaatatctgtcttcaaaggatcattagcactagccaaggagatttgatgagtgaaattttgtgtaggaatgaatgtcagaaaggcatgaatggttattaaaaagattgtgtcagcatcgaaaactcgaatcagactcgtcatctaaagggtatcatcatagaaggtagggcagcaagaacaacaagactcagtcgcataccttctacagttacagttggatctcaatcgggcacaatcaaaaaggcttctattcaaagggttagtgactgtgtcacgcaaccgtctcacgagtcgatgaatatatggtatgtctcagtgggcgaggttttctaggcctgccgcaaaaaggcgtctccaatcatgaccggacatttttttaaacgccgtcggagcccagtgccgtttcatcttcggacagagagtcgtgtaggaaagatgctttagtcttaccatttgagccagtagcgcagtaacctataagtcttcggaacattagcttatggtctgaaaagaattttcatgcaaatgttgagacaaggtaaagatcagaaatagccatttgtatcatcaccgacccgaaggtctgagacggtaatttccagcgtattttcatacacatcgcgttcatcatgatataggggaagggtagggtaaagagaccagggtaactcaccatctgcgcttgttgtgggtgtgatatctgcaaccgataagatgtatttactatcatttctggaaaggcaagttagctcagtccaactcaaggtttgtgtgatagttcaaagcaatgatgtgagatcagcctgacgtgcaataacataagtttcattccccggagggtcaaagactctagtttgtatttggttaaaggtatcatcatgttgaaaggtgcatagatgtgttagggatgaggacaaaatcttaccatcgttgcagatcctgtcgggcggctattggttagtgggaaacacattgtgtcaaagattatggttggctcaatgccagacatcaatcgacctcagtctccgtgtgcattgggatcattaaccatgctgaagatgagggtaggatgatgaaggagaaaaaagtgaaaacagaaatttgtacttttttcaagctctgacggcgcggaatcaccttcagccggacctagcctatattgggactagccttgacataggcgagttctgcttatgtcacccaccccaacggcctgccgacttgggaataatctagcattggagacagctacaacatacaatatacaacatataaaaaaggaaaagccaaaaaattatcataatctattgttttacagctgccagcataataaacatctatgcatgggatcgcttcttttcgcgggcccagaactgatatagaacagccagcatagctagcatgcacacatcaagggcaatagtccagttatatccaataaggtaccttggagcatcaacagtcttccatacactagataagaaatagattagtataaagttcaggatcagcaggttgcaccaacactcacaagagcggaatccaagccccaaaggtattaccaatagtattcatggcactgatgacaatagcacgctcctcggcactatgggcacagatctcatttgcccaggcatagataatagctgcaatcccatccgccgtgcctgacaggaagaacgcaaagaacttcagtccaatagggacattccagatcgctagcacaatacaagcaaagatattcagcaaagcagtggcagcaatcaagctagctttcgcatcgtacacatcagagagaactccacagatcacagatgccacaatagtgaccgccggcgagactgtcgtgatcgtgttgatgctctcgaccgagtatccctcctccttgagccagattggcaagccgctgttcgaggatacaccatcggcctgcgagaagaagaatgcaaatccgactagaacccacagccgccagcctttcaggatctggagaaccctcgacttggtgaatggttgacgggcttcgcggttctcggatgccatgcgctcttgcgcgaggcggacttcgtcggcgctgaggaaacgcgagtcgcatttgtctggtgtgctggggaggaggcataggcctaggaaggcgataggaattgtgcatgcaaagcctgatatcattagtctgtgtctcttttgttccttccttttgcgagacacttcggatacactcacaaattatgtatagccatctccacccttcaatcccgtaccgaccgtcaagcctggcataagctcccgcttgaatgtatcccgaactcatgctgccgacttgggaggcaatgaaaaagattgcgcctcggcgggacagttctgagcgtttataccaactgcccaggtaccattgcacggcagggaagaagaagcccccgagggcaccaacgaaaaagcggagagcgtagagctgggtgacattgctagccttgtactgtgccagagtgaagacaccccagaatagatcggcggcaggcaggaaatagttcacgggacagcgagtcatctataaaagacagtcagtaaattattgtctccatggggtagattctaagtgacaacgaaccaacaaagtcaaaggaatctgcatcgtgatgaacccaaccctataccaagtcagcatcaaacctcaattcacactccccgccaccaccaacccatcgtataaacatacatgtaaaccgtctgtagataatttaattggttcccataaagcttcaaatcctccttcatgccagatacataggctgtactcgtggccgatgaatccaagaccttagcccagtacgccaggaagacgaagacgatgatcaatccatcgagcttgaggatcagccgccgctcggcaggggtatccgtcggcgcaaaccactcataccatttctggcgtgcaggctcagaaccggacggatgctctgttttcgtggggttttcctcggctcccattgtctgcggggctttctcaatgggtagagaagacatggttgggtatttacctctaggctatgtatctccttgtgataacaacgctagcctctggggtatagggatacgacaccgccgatcagatatctgaattcgcttcatttttttccccttgggtgctttgagctgttatagggctgaaacggagcacgccatcggccgctagaatgaggagtcaatcaaattcgccggtaaatttttgacgctatcgccagaaattgcatcaagcaatgccaagctccgttctgattcgttggggccttggggtttgacccggggaaaatccatggataagtgttgagatggtcaagttttgcacttgaagaaggccggtattgctgtgggcctgggctgttgtggaattagtcaaggattatactcgtagatatcaaatcgagtaagcgtgttagctagcgttggaactatgcaggtgtagatgttgtgtgggaccagatctggtggcgtacccatctctgcacggaggtactccgttgatagcactagagaacaatatgatttaagattttattttatttttaatcccaacttgtgcaggtataactatcgtaaagcgctgaaaagaacaagactgcaacgaggcagaggtcgggaaaccaaaatgtaaaatccgaccaaaatcatcatgtccaagaatgaggtaggaataactagtgttaagaggatatatgcagggagaaaccagcatcctgaaagaaggaaagaacgtctcagcgagacgcttatttcttgtacttgttgtacatatcaatgaccttctggacctcattcttggagccaaggaagacaccactcttatcgtggattgtctcaggaacaacctccatcaaccgctccatgcgcgagttgacagcaaggccgcctgcattttcgaagaccatagccatgggcgcacactcgtacaggatacgaagcttgcccttggggctcttcgagtcggccgggtaggcgaagataccgccgtatagcaaagtgcggtaagcatcggcgaccatgctaccaatgtaacgggcgctgtaaggcttgccaccgtcttcgggatacttgaggctatggaagtaggcgttgcaccactcgtcccagtacttgctgttgccctcgttgacggagtagatggagcgcgactcgggcagtctcatgttggggtgggtgaggatgaactcgccgagggagttctcgagcgtgaagccgttaacaccgccaccgcgcatcgtaatcaccagctgcgctgaggcgccgtacatggtaaagccggacgccaccaggctagtacccgggtgaagcaggtcctctgggccgacggtcttgttgggacccaggagctcgtcgggaagctggaagacaccaaagatggtgccgacagacacaccggcgtccaagttggaggaaccgtcgatggggtcgcagacaacggcgtagcgagcatcggggtgctcgtcgaacctgatcacttcctcttcttcttctgagacgataatgcggcacttgccggagccacgcatggcagagatgaagatgtcattgccgatcacgtccagcttcttctggtcatcaccggttatgttcgaggaaccagcgagtccggtaaggttgatcaaggaagcacgacgaatgtagtaggcaattgacttgaaggagaattggagggcatggcacaggagcgtgaaatctccagaagcttctgggtacttgatctgttcttctgtgaagaatcgagaaagtgtgacaatatcagtgttgatgttctccgctccaacaggtgctgaagccattttggggtattgtttggaggatataggatatagagattaaaaagcgtagcaattgggtttcaggtgaagagtagcttaagtagcaggcgtgtggcaatcttgaaacaaggcagacaaggtaggagaagcagtttaacgtcagtgagcgggggggaattaaaccgggtagaagtatggggagtgacctcagtcccgttttcgtcatttgccccgcgtgacctgcccgggccctcgtccttcgcccctcgcccggttttccccctccctcgccgggaacgcccgtctcttaagtatggagcttcctatcaaaaatcactattattggtgatcgctgcacggattggaccttgtagcgataaacccctacctccctcccaaattagcttcacacccatacaaatatgtccaagctaatctgagatgtgctgcccaatgatctagatcctcccggtctgtcccttggccgactcggcctcgggatcagcagcggaagaagaaatccctataccccacccacagtcatgcgcacgtgaaaagatcctgagatttaggtaatgccattgttgtgcccaattaaagggggatatctacgctatggcgatagttcggtgtggatatatgtggcatagatcggtacaatatagataatgtataattctagaccctttacaatacaaaaaaagaaacacggagtgagacaatcccgtgttgtagaaataagaacgaatagactagtccacggggtcctcctccaacagggtcttgaagctgaaaggcaggaaaggaataccctcaccaacgaaatgcttactcattgcctcaacccagtgaagacggagcgagtgcaacatggcactggtaccttccatcacacacagaatgcaaatcgtcagcacaaaccagaggtagaagctgacaacaatcatgatcacacgggtcacggggttctcctggtcaaaggcaccaccaatggtcatggtccagagaacgatcgaaagttgctggtgggcaagcgacagagcccacaaacgaaggtaagaagcagtgtgagagatacagttgaggcagaattcgatggtgtggatgacttggtggatcatgatgtcgccaaagtcgaactcctcatgctcttcgctttcatcgatgtcctgagaaagcatggccacgccttctccgtcgctagccacactgtcacgacccagcccgccgtccaagtcaccatcggcgtccagtgcgctcaccctggagttctcgccgaggccgcggtaacccaaggcacgagcgcggttgtgttcgtagcggagccagagaggcttgaggaagagcatcacaggtacctgggccacagcgacgaggagcagaagaacctggaccatactctggccaggatagagttgttcatccaccgtaccagggctgaggaacatgaaaatgagcatgttgaggagaccgggagggttcacacccttctcctgccagttcacggtccacttgtagagtatagtgaggacaagataaccaaagattgactggaagaagagcaatccaggaacaaaatttccccagatgtcaaccttagatctgaagtaacgtccattgacgtattgcaagcaaagggcataggtcatgtggcaccatccaaggagaacgctcatcttcatcttcatactattcgaaaatagcaaggagttgtctgcttcgtgccagttccagtccagtccaattggaaagcgatagccttctctcaatgttgcctcgaccattttgccgggcttgatgtcctcgggccattcccactgactggggaagaaggtgaaagatttggagaaaatatcgttgtaaataaaaccggtgtagatcgagaacagacccatcatcaacataatataccgtccatagaatgccatgtatgtcagttcatccagtttagtccgcgccagcttcttttcccagaaaatcatagcagaagcggctagagtcatcagtgcaccgtgaccgcaatcaccaaacatgactgcgaacaagaagggaaaggtgacgaccgtgtacaggccaggattgacttccgaatacttagggataccgtaagcattcacgattgtttggaacccttcggtgaacttgttcgtcctgacaaaagtcggaggggtcttgtttgttcggatctggttgacgattgtaggaacagtgaggcccgcgcggtcgttcacgtcctggagggtcgacttgatcagagcaagagagtttgtcgggcaccacgcctcggcaatgagcgtcttccgcgcttggtcgtatgagaatttgttcaaggtatcataaacggccttctccttcttgacaatgatcatccaggcggcgagcgagcgagcaatttgggaaagttccgcatcaagggtgttcttggtgttacggagcacattgccaacatcgccgagacgggtgttgacttcgtgaatctggtccctcctcaactcactgttctcatcgacaccgtacaaggaggcgttgagcgactccgagattttgcggatcttagcaagaatgttcttgccatgagcgaagatgacgaaaacattcttgtggacttcctcgttcgtcattgggtcgataatgggctctggaatctcggactggttcatgtagagatttccgcgcagggtacgccagaggatacgctcaaaggctccgatgcgatcccggggaataacaccagccacgaatccaatgttcatttccgagaagctctgctgaccctgagtgtctccattttgatgaggggcgtgatgctcgatatcacggagcagaggagcttcatcgttgtccaaggactgacgaatgtcttctgtttgtgtatgggcctattcagttagccttgtctatcaacggtatactcgaggcaacttacccgatcgaaaaatccaccggcctctctaagtacccatcgccattcgctcagctcgacttcacgtttcttcaaagtctcatagctatcgttcagagagataatccgctgttcaaggctctcactgcgatcagccaactcatcgatctccgacgctaagggggcggccaatgtatcggagaaatccgtggaagatctcatagggattgcggccttttccgtctgttggtggaaatagcggagctgtctttcgacattgtccaggcggcggatttcttttgtaaaggttctttggaaagcgttcgtgtccgggttgagctaggaagacgttagcgggagtatcaaagcaaagcgctcttcgtcacttacatctcggaactgaacctggccaacttcacccaatgcactgacaacttctcttccgatctcgttggcaatatagagctgggtcaagctcatatccgccgagcggaagaaggtgtcccgtggaaccatggtgtaatgaggctaccaggagccgtgtctttgggaagaagacagggaaaagtaagaggcaaagagcgacagtaatagatagattcaatgagaggcacagatcctcggctctgttgttgcgaatagtccgggctctacttgcactcgttctcgggtggctctgtcaagctggctgcatccagccacgtgatttagtttgcacgtgatctcataggacgactaaactaaacaaaatgtctacaatatggccaacctacaaatagtaactaaattcctttaaactgctcctgggtagatgaactgatggcttattatcatgcttcgtctttcttccattctaggagtctgaatcagcaggggatctgtcctaatcacctatcggtgaataagagctgcttgccctaaccgatcatagttgaggaacgagtatgccatctcatactgcaaattattggtagtacgatttattgggacccgtatatactgacacagtgctatcggaacaagctgatgctttctatctatgttgtttttctataatccttcgatcgagtccctagttgacgtttccacttgttaggattaacgactttctcatgtcaaaaggttacaaagtcatctaggagatcttttaatcgaatgttgaagtactcgattccctaacatgttgaataatttcccactatgtcacccccagtgacggttcatgtttagaaagtatggttaactacccagaccttcgagcgtcagaataccaccgaatgagtcgatattccacctatcctactacctgttgggcttttccaactcaaaaagtgcaaccacatcaccttcaatcgactgctcgcggtagatactaaacccagtcctctgcagcaccttcacactgccaacattcgctctattgcacgccgcaaacagcttctcctttttcaaatccgatccagccccgtcgaaatctatcctgtcaagcttccaccacgcatctacaataccagcaacggcctcagtggcatagcccttgccccagaagtcaggatggatattataccccactgacggggctggactaagagcattgattcccgctcctccaataaccgtctgtgacgagtcctcggaacggaaaatcgcgaagaagaacctccgcccaatggcacctgatgcatccggggttgtaaatgtctttttggtaatgagggcctctgactctgatatgtctttgtggggtactttgggccagctacagatatagtcacaagtcagtacataactctcccgggttgtcgtggtggttgttctttgggtataatcttacagccagtccgctacgtcttgtcgtcggcggatctcaaaaatggccgtggcgtcagctaccgtcagtggtcgtagatacaggcgacttgtgtggatgggtctcaaatcggccgggacgatcacggatgtagcttgatcggggtagaagctcatgttgacggaatatgcgatgttcttagaagctgattcttgttgggtatagaaactacagttatatatattctgcgtgagtcattcgcggggctggctggtcaggctggtctacaacaatatcccataccagcgatatatacaacacataatagagatgcaatacaacaggacagcgaatacattttgaacagacctcacagaaatatattgctgtctagcttcgaccaccacgccgggatagcgcatcttaatgctttcgaagctccgatatacagtgccgcctcaccaattcagaagcccagaaattcaaatcaaaacagtttgaaattaatcatttacactcataatatatagtcggtggaaaaacgaaaagccaaccccatcgtcacggatagacagcagctcccatagagcggagtcgacgagcacacagaatgtacagccacagatcagcttcgacttaggcaccgccatccctcttcgcgtattcatcctccatccgctcctcgtacaggcgatcggcctcctccttggtcagagagcgaccactatcagcattctgcgacgggctggctgagtttccaggcgcggtcccgaaatagctgttgttgttgatgtggtcaggggcagtgtgtgaagcggagctaggaggttgtgtgcagttggcttggctttgttgcttgtcaaagagatcggcagtggggacgggcatcttggttcaggttgagtgtttaagtcgcgagtgcggcagtgatttcgaggaaaacagattttcaaggaagtaagtgaggatggtagactaggactcgagctgttgcgatttttggcttcggtaggatttcatgctggttttatgctggctggcaagagttgatctggggtcgccacagatgtggcgacgccactgtgagtcagacgtcatgtcaacaaaacgcagctgagaagtgagatttcagcagtttacggttggtaggggaactggggattggagattggacgctggagactggatgctagacactggacataaagtaccgtagaatgaagacgagatgaatatgccatcatttaattactgatcgcgataagcaacaggccgttgttgatgcgtgccgagggacgtggggacttggcgcaacggtcgcaccagcgcaagggtattccaagggacaaagttacaattacaagaaaatgaataattgccattagagcttattactatgatctacgaattacatctcttctccaaactcgagccactggctcaaggttgatgaaaagagttccacgaaggagagtgccaaagaatgcgcctgtcaatgaccacgagagccattgaacaaactgttccaccacgatgtgcaatgcagggaccaatctgtggtgacacgtcttattgatcacggtcacccaaacaaggtaagtatgaagaagaaagaaaaaaagaggaactggactgggaaaacgcggatatatataccctagctggaaagcggtggcagattcccagattcgccacctcacactgattggtcagcaaccgaagcaaatatgagcacgtgacactgccaaggcccaaccgcatgtgatatgactcatccacctccctttctggacattacagacctgtcaggtcagggcgaggaatgacgctacggagtatgtacagtgcaacgtgcaggacacaggtaccatgcatttctttcctaggtttcatgcttgcgccagagtgagaatgaaatcatgaaccatgaaccaacacacagacctcaaacatgaatcaataattgaaacctccttgttcgagacgcctcaaaaacaagccagactccatacccgacccgagcttgtgtggatcctcccctatcccacaactttgtattgtggctctcacgtcccgtactactcaaaagtccgaaagacgtttggatcacaacttgtttggaatacggtctgtcggaagtatacccttattcagagggttctacaagattaactcgggtgaggaacccacagttaatatcgaatagcaagtaaacgcccatccttatcagagtgtgccatggtttgagtcgatctagtggacgctagagtcgtcggggcttaaatggacgggaaatctgtcccttgtgtacaccgcaggtcaagctggcgcttggcgggaagtattacgattaatttactcggtaatgagctcgggagatatattctgttcatgaaagtagagtcttgctgtggtactatattttagtttttttttcctgctcgaaacctatagttacatgcatcatgtacggtgcaaatgtaagtccctggaacaatcacaactacaacgagtaatatggagccatatgtactccgtattccgtatatgcatcccgaaaaagcgggaaagaatccataggcgcccgggttccgctatgcatggcacttgcatggtgtcaaaatatagcccaacaacaagagaggagcaaagatcgacaagctgacttggaacaatgatgtgatcgtcgacgagcggtaaacgccgaccattcatgggatgcagcaggaggagggttgagcctaggacctcgcgaccgcaaaaaaagggcgaaaacggtaggcttggtacggacatgactggtgcttagtcgccctagaggtctaacgggtgcaaaaggggggccatgatagggcatgatgagataccgagaagggggtggattcccccgtgcggctatcattactggaaatgtttcaatggccacattctggcagtgttgggctgcgacctgatagtgcttgtcctgaggtagttgtagatcataccacctacctccggagatataaggtggtgccataggacattgtacgagaagaacagcgtatgaaggcactttccgttctcctgcagacactatcttgtcgatgaaccgtggaaatgaggaaatgaaccgaataaagtgcttgatacctacactgagtttgtagggctggccccttattcgctaagactcgaaactagatgcgtagtccggtggagactactccgtacttcgtgttgtacgtacttttttgatatattatcaccactaagaaatctacggggaaaacatagggggatgtaaagggtgacagaaaaggggcttaattaggggcatattgtccaagcgtgtagatcgtgttttcagtttcaactatgttttcctgcaccataagagttactttgtactccgtatgctgtactccgtggattagcagtatgagacgatcctggtatggaatgatgcgcatatcacgtaaagaggcgacactttgtaaatgtgctgggattggctagacgaaaagatcatgggacctttcccgcagcgcggcgaagacagttgatacgccgatagggacgtacatcaaagccggagtcaagaaggaggggttgtatcactgctggttggttgtccacgaggattcgcacgccactacatcatagagttgatattcggtcatggggcctgagtaacgattggaagtcgtgatggccaaccattgtagaacctaaagatgagtgcatggcccggtagccaatacccggcctaagccatgtaaatgcgacaaagttcatctacatagacggcgcactaggctgatcatgacgaagcaaaatgacgggctgccttgcggtgatatggtgggggtgggcatggagtacagggatgcccctccaaagggatatattctagtgccgatatagcctttccgagggagaggcttgcaaggtcggatctacttttgactacggagtacggagtatgcggagtaatacagaagaaccatcgaaacatctagttgatttgacaatgaatggattcggtaattccaacggcaacgccccccttgaactgtgtaacggcgtagttgaacgatgtggaatgagcgccaacggtgtggcgacccaccgaagaatagaacctccttacgggccaggaagtcactaactaagtatacttttcttgtgtctgatgacctgacaatctaagataaccccgccatgacgatatatttttcttgtatactctatagaatatgaaacgaacagaagttgacttttaaatcggtaggagcatccgaagtacatggagtaataagcgagatgtgaccgttgattcaagctgcatggccgatcatggcctatggtgtgatggtttcatacagtgcaaggccaagaattgcagagttttctttctcctatttgctgtttagttcctaaatttagttggatcaggtctagcgtcacggacaaagaagctcgtgttatcgtaagtattcttagggcatagattggcacacttccaaggttgtccatggctgttccacttgcaaagttagttgcaaagcgtatttggcgttacacaggagactgatagagtgcaaaaacagaatggaattaaaaaaacatgtcaaaagggtaatgagaatgacaaaatacagcatccatggatgaaaaagacatggcccgtaaaaacagaacgcaaataacggaaaatgacaaaaagaaaccaaaaaaacaaaaaaacaaaaaacaaaaaaaaccaattaacccctgaagcgccattagctaatctttttgtgggtcccctgagctctgggctccctgcaggtcctttccttttcagggaggacgccatcaacaaccctctgactcttttttttcccttttcctcttctctctcttctctcttcttcctcccacaaagcaaaatacccttacttcgtgatacccgagctattgtgctctaatttcttttgctttcttttgagataccctatacccaacacgcctattttacccctacgaagcccagcttctttaatacccgtttattattttaatcatgtctgaagtccagaagactgttgaggagaccccggtcgtccctaccgttgaacccgccgttgagactcctgccaccgaggcagcggtcgaagctcccaaggagaccactgaggaacccacagccactcccgccattgagagcaccgaggcttcggagcccgccaaggaggaggtgaagcccgctagcgagggcgttctcggccacaaaggccccggtctggtcaagtaagttgcgactgagatcacaactgcgacacggagactgacaagtgttcttcgtttcttttaggggcttccgcttcgtcaagcgcttcttctacttcaacgaggaggccactgagagcaagcacctctccgtcttccaccagaacgagaagtcctccgtcgccaaccccatcgccgcctgggccacccagaccggcaagggtctgcttttcttcaccaagcgcgctgaggacaaggccacccccgctggcattttcaacctcgtgagtgctttggcaactgtgatgtgatgcggcaaactctaacaatgaataggccgatgtctctgacgtgaccaaggagggtacacacgagttcctcttcaaggttggtggccacaagcacaccttccaggccgccaacaccgccgagcgtgacagctgggttgtcgctatcgaggctcaggccaccgaagccaaggccgagaaggagaccatcatctccagcgagggctacaaggctgagctcgagaagctgaccaagcctgccgttgtcattgctgccgccaagaagaccgaggaggagacccccgctgtggctggtgaggctgcccaggaggagcccaaggaggagaagaaggagaaggccaccaagagccgctcccagtctcgcaagcgcgccagcatcttcggttcgctcctgcccaagaaggaggccgaggagaagaaggaggagactcccgctggtgaagagaccaaggccgccgagcctaccgctgagccctctgttgaggctcctgctcccgtcgttgccgagacctctgagactgctgctgccccaactgaggtcgctgagcctactgctgagacccctgctgagactaccgaatctgccaaggaggagaagaaggccgaggacaagaaggctgagaagaaggccaagcgtgcttccatcttcggtaacttcttccagaaggtcaccagcccttcccaggagaagtccgagaaggaggctaactccttccctaccgaggagactcccgtcgctagcactgctcctcagctcgagcaccccgtcgaggaggccgctgccacccccgaggccgaggcctcgactacccccgctgaggctgtggagacccctactattgaggctcccgccgccgagcctgtccccacccccaaggagaagcgccgcacttccttcttcggcaaccttggcatcaagaaggagaagaaggactcctccgacaacgagctcaccgatggtgaggccaaggagagcaagcccaagaagctcggcagtcttttccgcaagcccagcaaggctgtcaagcttgacaaggaggaggctactgccactgagactgaggccaaggctgacgccgctgaggaggcccctgccgtccctgccaaggagactgaaattcaggaggcccccaagcccgtcgagaccgctgaggactccaagaatgtcaacgttgccgtctccacccctgttcaggctgccgcatgagatgcgactcggagtcctgtggagtttgaacggtggtgggacgtgtcctatccgccgcccgcccgcgatatacctgacgggctgattcagtcttgaaggtgcaactctgataccacttgctccaattgttttgcttttccctcgccactgtcgttatcttcggtccacggcccccgtttgtgtttgggcctggatctgagatgacgacaatgagatacccgctgtcgctttttttctttgattttctctaaaataataccatcggcgtcaacgacgcccccagactttggactgcggctcattcctttacgacctgcgtcccgcgattgtgactctgttcgcgacgcgactatgtgttacgtggtttgtcgtccgactagattgataccactctgccttttcttttttggttacttgcttttgtgtttgataccctgtggggaggatgggtgctctttttgcttgttgcttgagctttggatctagtctgtcgacttgtttctccctgcaacccaaattggccctgtaatgttgtctaccgttgttgtcccgaacggctggtttatattccgccgtataggtggcataccttgcgataggtaatacttaatagaatctctcaattttgctttacatcgtcatcgtattgtagttttgagcttggtcgttacgtggcgcaggcgataatccttgctgccaggctagtagttgtaatctctagcagcttatgcatatgatactgggaactccctcttagacatacttgtctcctacctcccatgtacctatttctcgatggtctcgtataaccgcaaagtgggtttgttcgttgtatttgctatgctaccccccttctattaatactgatgcggagacccagcactccctttccgcatcgtttaaaaaaaagtgtcatcgcaggctttatctttacgacatgcactgattcaatgccgaacctcttagagtgtatcatgtcgttcaatcccgggtaagacatcgtggccctaataatacagccacctgaatatcctcatccccgttcaaatgctcctcgggctcttcctctggggcatcacgttcggctaccgcgggctcgatgacaacacatggtctccaccaatccctgagtaaccaagatcatcccggtttcagtggaggcatcggcttccatgcgttccaagtggctgttcagagaaagttgagtgtggcagatgtcaacctgggattggggtcgtgttagttgggcagagtaactatagatatattcacgaatcggtcgtggatgaccttgccttccgcattgaaagcaccaagcattagatctaaactatccatagtcgtaggaatatccatttctacacctagaaaagacccacctgggaaaaagaaaaaatcgggtccataccgttgcatatgtatatgcaagcaatactcatagttgaggatctagcgacccatcgtgatgtcttggcagtctggggtgcagccttccatgttggtacttaaagaggttcattcaggaaaccaccattcgattattggatcaggcacggacgtactgtaatatatgcccgtgaatatccgtgagatcggcctctacacgagctcatatcgcggttacctacgtttaacatttgcaatatgatgcgatattgattgtagcaagatcgacagcagtctagacttgaaggtctactgttgactatgctagacaataatgacatgttcttttccagtgcatcgcacatgtctgcaaggtgcccggcgggctcctatttcggtaaagcctcgggccttggaggtacgtcggcattatcgcaggagaaacgaaaaatcaataaattgggtctgggttacgcagtgcaccgtattcgtattgactttaaagtatatcgatattctgttgagttattttttggaatcgagttttggacgagtatagaatgaagactggattagcatgctatagttatatctgagtactgcgtgtataatgttgtactgtactccgtctatatattctactccgtactccgagtctgcgacaatgaaattccggaaacaaatgttaaaagtcaatttcacgcccttcggcaagactaaggaaacgtgagcctctcataggacattggcgacggactcagcccaccggaacgagattgggaaaggatcggtggatccggtgcatttttctcattgccctcatggagaacgcctgtgtctccccgggtctacgtgcaacctcatacccaggtaccaaggaggaattgtgcggtgcctggatggaattgatttccaaagaagctcagaagcttggttgtgtgggttttgagagattttgggtgcaagaaaccaattgaggaaaaagcaagttaaattaaaaaagaaaatgcatgccttggaattccgggagggataggaatatgagcgctgattggtcaattcgaaaggaagcggagaggatcctggggacaggtacttggaagatacctgatttatgtatgcagatgcaggccaagtgcaggtaccatctgatgtactgcagtctcgatggatgcctgtccgatgtaaccaatcacacccacgcatgcaggctgtgactcacaccccgtgacttccaggactaagccccgtgcggctccggagcaccgattggtcagcaccagggcacacagcccttaagaagtgcctgagttccccctccccgtttgcctgatttttctctccctatacccgtctcttttttacacacatacacataaaccgccaaattgctgccacaccagaactatttacaacttcaccatcgccaaaatgggttcccaataagttccccgtctttcaccagccagtctatctcaactgaggcagacattatttctccatccggaaaccgccctttcatctcctctctacccccttcagagcctccttttggatctctgaactttagcatcgcgtcgcgtagctccagttctcccaacaaatttaccccgatcgacttaacgtcgttcaccacggattaccaccagcaaccatggcttccatcacccccacctccacagcccttggcttccaatcagaacaacaacaacagcaacaacaacagtgcactcgaggactttgtgctttatccatcagccacaccacacccgcagccccgcttgcgtgtgcctgtgaacacaacccatagaccttctgcactccagccattcttggcgcagaataacccccgacgacactctttcagtctgcagttgcaccgacatctccagcagcagttctctggttcacctgtcccagaccccagagtgacccagcttgcccggtccccctcttattggtcccgtcctacgttcacgcaccaccgttctaatacggcttctgtgccttccgattctccaaacaccaaccgcccacccatcccgctttttaacggtcaaaaccaaaacacgccaacatatcgacgtgtcatgtccacccctaacttcatggaaggtaattcattcatgtcgccctgtgatagcgagtatatcgctaactttatgaaagctaacgaggttgacctgtttggtctcccctcgggcgacttcgccgctggcatggattcagctctttcattcaacgatctcggcctggccaacttctcccctgaaggtcccccgggcactatctcgccgagggatctcatgatggatgcgtctgttcctccctccggtactttcaccgacctgagcactccctcgttcgagtcgcccggcaacttcagccaaaacacctcgcccatgttcaccgacatggatatcgctggccacgaagaatggccctctcttttcgaccactcgtcagacccactcaatgccttcgaccttgctaccttggatgtcgcagctgccttcactgaaccgaagaagccagccacgacgacaatctccatgtctcctgtctccccccgcgccaagcgatcggccgcatcctcgcctgttcccgcctccggtacagccaagcattccagcgtcgcaggtgtcaatgcgcgatcgcgtaagaacctgtcgcctgttgagttcgaccccaatgatcctattgctgctaagcgcgctcgtaacaccgaagcggcccgcaagtcgcgtgccaagaagatggagcgccagttcagctccgagcgccgcatcgaggatctccagaagatcatcgccgaacgcgacgcggagattgccaagcttaaggctcagctccagattcaaaatgcctaccagtaatggtgctcctttttctattcttggtcattcaaaatttgagacacgggtctttgcattatggccccctcggtgattctgacgattgtaacgattggacatttcgtcttcatgtttttgtttcgtttcgaccctctgggtattgtggtaggcgcgggtgatgggtaaagcctagccccgacgtctcaccgagatcagatgaacgcgatttgcttcgtcgcctctgattctctaaaagtttgagacaagttcctcagtcaatgtttctttttattttttccttctgatctgtgtttctcacttttgcgctctgctgcttcagcttacctacttcggtttttgattacttttgttaggccggttctgattgtctccctcttatgggattgactcgtggctctcttaatatgttatttgtctgtgtttgaatcaatcatcttgctctatctcttctacgtgtattgtaaactatcctagtagactaccccttccttctaaagactatttgtaactccctggtaccatatccttccctcatagatatacgaccgaacgataatctatctgcatctccctcaagtgaaagtgaaagtaatctagtccagctcagacttgcctttaaaatgcctcataaacacacccgatcccccaaccaccctccatctcataccacccgcactcacaacccttctcccatctccccctccctgtaccaaaaccctaaacagcactcctttcctccgcatctcgcccgcttccattcaacacgagcaacgcaccgtccggggactgctattgctctatgcgtgaacgaaagagggtgggagacacaggagatggggcgtttgaggttctggtgtgcagatgcgggtatttgagatgggtggatgggtgtgtctgtggatgtagtgtatggaaacgaaggacggttgttgggtgaggtaggtttcggaagtatctgattccatgttctgtcatcatagctggtggagggggtagggatagagatagagaaaaagatggagatggagatagagtagaggggggaaatgaaaggaagaaaagaaggatatctataatggaggatagaaagaaagagtaggtagatggatgatggatgtgtaggaagaagaagaagtggatacgcatgcgtaaagcacctcagaacgaaacaaacaagcagcagaaatccatccgccacaagtctccctcagctcaaagcatccgtacccctcgacctccccgtctccatcttcgccgtccgcgcgccaaactgaatagccctcttcttctcacgagaaaccttcaccaagcccagccgcagagcaaccagacgcagcgccagcttctcggcatcaataccagccgtagcctcgatttccgggagtccgaacccgcacttctcccacacaggagcccgcagcgtccaagccacgaactcttcgtctaggaatgggaagcgcgtttcgcggccccagtgcgagaggacgcggtcgtcgcggccgagattgcgcgacccgagtcgactgacgtcaagctcgatctcggcgattaggtctttgaagccgccgcggttgaaggccacgctgtgtcggccgtagccggcgaagagctcgtcggcgcctaggccggagaggaggacgcgnnnnnnnnnnnnnnnnnnnnnnnnnnnnnnnnnnnnnnnnnnnnnnnnnnnnnnnnnnnnnnnnnnnnnnnnnnnnnnnnnnnnnnnnnnnnnnnnnnnnnnnnnnnnnnnnnnnnnnnnnnnnnnnnnnnnnnnnnnnnnnnnnnnnnnnnnnnnnnnnnnnnnnnnnnnnnnnnnnnnnnnnnnnnnnnnnnnnnnnnnnnnnnnnnnnnnnnnnnnnnnnnnnnnnnnnnnnnnnnnnnnnnnnnnnnnnnnnnnnnnnnnnnnnnnnnnnnnnnnnnnnnnnnnnnnnnnnnnnnnnnnnnnnnnnnnnnnnnnnnnnnnnnnnnnnnnnnnnnnnnnnnnnnnnnnnnnnnnnnnnnnnnnnnnnnnnnnnnnnnnnnnnnnnnnnnnnnnnnnnnnnnnnnnnnnnnnnnnnnnnnnnnnnnnnnnnnnnnnnnnnnnnnnnnnnnnnnnnnnnnnnnnnnnnnnnnnnnnnnnnnnnnnnnnnnnnnnnnnnnnnnnnnnnnnnnnnnnnnnnnnnnnnnnnnnnnnnnnnnnnnnnnnnnnnnnnnnnnnnnnnnnnnnnnnnnnnnnnnnnnnnnnnnnnnnnnnnnnnnnnnnnnnnnnnnnnnnnnnnnnnnnnnnnnnnnnnnnnnnnnnnnnnnnnnnnttgagctgaggggtttgtttgggctgtgccttggccgcgggatgcgaagtacagggcgcatgcgatggacatgtccatttctgtgttgtggggtctcattaggcgcttgacttgctcccggtgtgcgagagtttctgtgtaggggatgtcgatggcgatgaagcgccatgtgcggcctggacaggttgcttggagctcgatgtgggcggaccggccggttatccggtctgggcagttttcatatattgagaggggcggggaggagggggatttttgttggttggcttttgcggcggctgccactcgcgggttttcgaatgctacattgaggaggtcgattggttcttcgagggggagaatgtcgtgagagagtctggcgagaagtgtgcagtctaaaccaccggagaagagaacggcggttttggccgtctggcctacaatgtagcctggaggctcggggatgttctgtattcttaattcgagggattgaagcagttttgactcgagttcctggacgaatactgagtctgttgtcaatgcaggaggctgctctgttggtaaggatgtattcataggtgggattgattttctcttggtctcttgtcagttgctgctcgcgggaagatatggtagacatacaatgtgaccagctggaagtgaagcagcagagctccatggcaaggtctcgattttgcacaactctctggcagataaagaaggatcttgatagcgagctaggtcaatcgtacaaacgccctcggtgcccacttccttgaagcaatccagcgatgcgctatcacaaatgctgcaaatcttcaaatttccattttcatcaaatccctcgaggagcgatcgcctcccaagacaatccctgctgtagaagagccttgagttgaccgcatcatagaagacaaaggcaaatggcccagagagacttgcaatggcttcagccattctctcaacaggatcattctgatcacccttcactgcctgtagaaataagttgaaaacgcgttcggtatcattgccttggacgcgctccccagcgatcttccaggcttctccgttccagcagagcacagactgggttgtggggtctacaagtggttgtgtgtacacatggtcacctctcaatgagagcactgtggatgtgaaggtgagataataggaaaggggcggagacactccatcctgtgcgttgatatctttttgcgccgtatgagttttgtaactgtctggtcctcgcttttggagcagagtgcaggtctcctgtgtcggtggtgtcgactttgacgagctcaatgaaaagaaaatcccacacatggcggagggacaggtgggagtgttgtttattctgagatggtcagcttgggctttttttggatatagaggtgcctgaggcattaaggcattagtcattatatccacccgccttgtcaccagcggatgcacttacgacggattggaagatgttgaactcgtagatggtttattactagatggtgtcttctaagaatgagttcgactctgaaatccgtgaaaggagatgggcatcatgcaagtacctatcttcgaaggtctggattacacaggctgagcaatgttagaactacatataggtatggagtagtaaatacatctcttgccgagtgagaaatccataatgatactgtgaagtcagcctccttaagataacccaaccatctgggcactcattcctctatacattattaatagacaccgcctgaatcgagaggcggactacctcggttgaatgatgatccgtacatcaatatgaggagccgcatgagcatacttggagtcttcatgaccccctgaatctattttttttgcccgggcgcatatgactaacatagcttatgtcggccacagaatccccgtcctctccgggtcccgatacgagagacgtcccccatatccatgaacacaccgaaacgccggccgctccaaccgaccgcctagctcaaacacaggacggtctcgtcagaccagacagcagtcaaatagtccaaatgagcgcgcaggatacaacagaggcacaccccgcggctactccctccgatcccgccgcgatggacttgacgactgcccaaccaccacaggctgaggctgagcaacttgcggggcagctggaaggactgtcggtctccggagatgcgactccaaatctgtcatccagcgcaaatactcctccgccccctccgccccagaaagatgatgtctacctcaacctgacaagttctacgaccactgcgccaacgctgccatctatcgatccaaaccacacccccggccccgaaaaagagctcccagatgtgcctagtgacagtgacccggaatttaaacgagctggtcaggctgaaggacctcgggacgataatgcctcccagccagagattcaaagtatcatgggacaattccaggaccccgcgcagagcaccgaccaaaatgtgatcatgtcaccacggcttgagcttgctgagcaactgcgaagcggtccaacatatttcccgccacgtcaatccagtttggaccatgcggcttccaccgagtccgtgaccgctccggtcgctaccccggagaagcagcctgtatcccaacgtccgcagatgcccgaatcgccggtaccaaatcggagagcgtccacctcgacgatcctaccgctgccggaaccagagcctgaccaaccattcgattttcaccgcttcctagaacagctgcgacaccgcaccgccgaccccgtagccaagtttctgcggtcattccttatggagtttggcaagaagcaatggatggttcacgagcaagtcaagatcatcagcgatttcttgacgtttatcacaaataagatggccatgtgcgagatctggcgagatgtttcggatagcgagttcgacaatgccaaggaaggcatggagaaacttgttatgaatcgtctgtattcgcagactttcgccccagccattccatctccaccgacgatacccagaagcgcaagtcggacccgacggagagagctagagaggctccatgggccgtggcgacgtggccagcatcaggaggacgttgagcgagacgatatcctggctcagaagatacgcatttacagctgggtcaacgaaacacatctggacatcccgactgtgagcggtggtggacgccgtttcttgaatctggcacagcaaggtatgtactatgttctggagattttccaacttgacttttctgactttgcttgacagaaatatcaaaaatcaatggctaccgggctcctcgagacaaggtcatttgcattttaaactgctgcaaagtcatatttggtttattaaagaattccaaaaaggccgacacatctgccgactctttcatccccctcctgatctatgtggttttgcatgcaaaccctgatcatcttgtttctaacatccaatacattcttcgattccgcaaccaggataaactgggcggagaagcaggttattacatttcatcgttggtatgtttgacttccatactgccatagatatccaaactaacctctcctagtctggagccatccagttcatcgagactctcgaccgcacaagtttaacagtcagcgacgaggaattcgaacgcaacgtcgaagccgccgtgtccgctatcgcagaacaaaaccgggaatcagaaaccttcgaagagaagactcccactcaaccccctccatctcaaccccaggctggaccaagccgcaaagaaactactcaatccagtgacgaagacaccgccccagtcgcaggactactacgcactatccaaaaccccctcaccaccatcggccgcatcttctccgacgacggagattcaggctccgctcctcaagaacgtcctcagcctgtcccgacaccccaaccaggtgtcgctcctccccgtctcactccgaatgtctaccagccaccccgcgcaagcagcgaggaccgccgctcaggtgatgagcgcgcccgcggtagcggaacctctgcgaagaagaatctaagccgtgtgctcgacgctcaggatgctgccgcacgccaggctagtgctgaagatgcggaggcgcgtcgcatccaacgcgctgaacataataatgttgtcgagacactctcgaacatgtttcccaacctagatcatgatcttattgacgacgtcgttaagatgaaagagggaaggtgagtacttgaaaaggtttatactattggatctttactaactgttcctcgcagggttggtctagctgttgatgcttgtcttgctctaagcgcagagtagtatatagaataatgtagcatcttcgcctgttcggggataacatgtcaggaacagtctcaggggcaattctgtctctctcatctttgacttgaaataaatagccccagaggtgtatctttcttaaaaatataatatcgcctccttcgcccggcagaggtacatccaccaaccggaactatcaattattgcagctgctagactgaagtatctatttaattgaaataatatatttatatgcatctgtgtataagctgttaaaaagggatggtcatcggcagttgaacagggatgaatgcctcaaaccccagagatcctcggctcttccccgcaaaaccgcggtctctcgggattttagtgtaactcattctccttcaaagagtaacatattacaataattccgatttggaataaatacagtctcttcttctccctagaggcaacattgcacaccatgtcgtcccccttccgcatcattgagcatgtcgtgcccactcagcacattagggagtatcctggcgccacggccaacgaccaagaagagcccctatatctggccgtgaaacaatatattccactcgacaatcccaatccacaaccaggcgacattaccattcttggtgcccacgcgaatggcttccccaaggtatgagatacaagtgccgaggtccagacccgctttgggctgcgcgcatagcgatggccctggacgcatacaacctagaatcggcgatatactgatcatttctcgcaggaactatatgaaccgctttgggaggaaatctacgctcggtctaagcagaatgggatgcgcattcgcggtatctggatggccgacgtggcgcaagaaggccagagcagcgtgatcaatgaagactccctcggaaatgaccgtatgtgtatgagtatcttatgagaagcaattgatactaactatataacagctagttggtttgaccacccccgagacctcctccacttaatcaacgtcaagcgggctgaaatgccccggcctatcgttggcatagggcatagcatgggaggcgcccatctgtaagttccaccaaccatcacattcacacagcagctagctaacctactcctagagcacaactgtgcctaatgcacccccgactcatccacacactagtcctcctagacccagtgatccagcgccaaaccacgcaactagacaatctcagcctgcaaatcaacaagcgcgtgatcgccaaaactacccaactatcaacccaccggcgcgatctctggccctcccgccaagcagccgcagaaagcttccgccgcagccccttctaccaaacctgggacccacgagtgctatcccgctggatcgagtacggcctgcgcgacctcccaacagccatccacccactagaccccaagaccccgataaacaaaaccaccgggcccccagtaacactccgaactacactacaccaggaagtcttcaccttctcgcggccaaactacacgaacatccctaacagcaccaagcccgtcaaccgcgtcacacacccagacctagacgcaacccatgcacacagctaccccttctaccgaccagagccagcccgaatcttcgctcagattcctttcctgcgtcctagcgtgttgtacatcttcgccggcaagtcggacatgtgcgggcccgatatgcgcgccgataagctcgctaacaccggtaccggactgggaggcagtggcggcgtggctgcgggccgtgtgagtgaagtcttcctcgaggattttggtcatctccttgcccaggaggctgtgaatgagtgcgctgatgcggcggtttgttggcttgcgccggagatccgtcgctggcgggcggaagaggagagtttccgcgcggcttggagtcggaagtctaagattgagaaggttactgttgatgcggagtggttggagaatgttcctgcgccagcgcgtaggccgaaggcggtacagaatggggagtcgaagctataggtgaatgatttgttcgtagaagtataaaccatatatagtttgcttttagattattctacatctgaatatagaacggtcaaggctcgtctgagtgtttttctatttctttcaggccctatgaatgagttcgccgaatcaacgactataatagttcacaagcccgaccccgttctatagcaacgaccccgtgcgcccccaattaaaaaacaagagcaaaaggtatctctatggtccaagccaaaagatccgtctccgggacgaatggtgttcgcgaaagcaacgccaagaagattataaagaaaacagtgctctgctccgagtctcgcggcaaaggacagacaggagcgtggtatctattttatgtcgagggtcacatttgcaagagtgtggtatatcgccacccataaaaattgggtgcgagtaatgaaccaactgggagagagaatgtctcggcagctgtttcacgttgacttcttggctcgggctaccgcggattcggatggcacatccgaggtgcggaccacttcgggaatctgccagaagtgcacccagcgcaggtggtatttgtcttgttcgttgttgaggcagtggcggagccagattccccacgtgatatagagataagcaccgatgccagtcatgatatgcctgcaagtgagaatgaattagcaaacagaccatagcaattcatagtaggttgagcacataccaccaaccatgtccttccaataggagaccccatggaagaccaacagagcggcgataccgacggatctcagagcagtatatgttgtccaagccccagatgaagaaaccgcccaaaaacatgctcagtccatatatcaccatgaaccacatggtcttgagggtcttcatgtcgcgcacattctcgtagttctggcgctccttcgtcggaacgggaagtcccatcctctggcgtgctaggcggtcctcttccgtcgagtggcgccatctgggtcggagggttgtttccatagtgtgcatgctgcggaagacgacgacggtagtcaggcacgcgtatgcattctggtggaagactgggtcttggagatagtggtagtacagggtgatgaatacagcgagacctgtgagcgtaattccgagaaagactcgtacggtgttggtccgggagtacgagaatgaggcatatgccataaggcaagtggtatagatcatcgagagttcgtccactagctgcatagggtctgttgtggggttcaccggtcagtattgctcttgcgatcactcatatcgtttaagacatctttggtgggggcccgccgcccttgaccacatcttggggttagtgtgtaggaaacttacacttgagggtcgagtgaaacagaaagcttcctgtgccgactactaggtagccaacgagggcgaccgtgaagatttggtcatgtccattacgacggcagctgcgaatgccctggactccaagccacatgaacagcaaattcgtgagtgtattgacaatctccgcggcatagggggtagcataatagtcctgcgcaaagacatatatcagcctagttcttgcctctgcgcttcctcatggttggaaatacacacctcttcgcaccagttcaaggtggaagtgacaggctcccagtatccggcctttgcggtcggatacggaaagaagggcaaagaccaaggcatttatgctgtataccaaggtagtatagatgtcgactctgtaaggtctgtaaggtctgtaagccctataatgtcctcgaaattcaaagagaagggaaaagagaaaagaacaacaaaaagcacatgacgtcgataacccacgggctcgttggtccgtgcacactccgcgagatgccggatgcagtcgatttcttcactcgagggctatttattgacatatttgtaattaaatttcgatatttacttcgatatcgacttctctatttgtgtttgtatgtttctgcttgcgtttggggctgtaaaacagtatgcatatgcgttggaatgatctacatgaagtactccgtactccgaacatacaacagccttacggtcaaagagccgcatgtgggatagtatagcagtcataccatagtcatactatgtagttgactttagagtgccctgagctacttgaactataactattcattgcataatactaatcttctactccgaatattgtacaatgtataaaatcaacataaaatgccaagcggtgtggcttatcgatagccattgctgaccccgatgacttcactgtttttcaacgtctgtcggcgacctcggcaagactcagcacttgcatttgctctcgatcttgttcaattctatttcccctcgttgaatccctggtggaatgcaagccagtgcccacatttgactgagaccgtctttgtggacctctcttgttttttttttccgcatccggtggatacgcctgcctgaccgctacgcatacgcgacatccatggagctcgatctggcattgaatcctctacctttaaaataaatatattctctgtcgccgaagtcgcggcccgggttgacccagcaatgtcgcaaaataacaccctaacggtgccacaggtgaaaaccaacacctcaacaagtatgtttctgtccaagctccaatcatttccatttcattgctaatcataatctgcttactgctatagcctcaaaaacaccctttcactttgctgctggtctttgctctggccttacctcctccatcctcctccaacccgccgacctcctcaaaacccgagtccaacagtcccagggagccgccctcctcccgactttgaaggctattatatcctctccgcatccaattcgcggattatggcggggtacacttccttcagccctccgcaccggcttcgggtcggcaatatacttcaccagtctcaacgcattacgccaagccgttgcgcaaaccaaccccaaagccttgaccaatccggtaacaagcgctaggtcatcatctgtcctcccaaaactctccaacacagccaatctcaccacgggagccgtcgcaagagtcgccgcaggcttcgtaatgatgcccgtgaccgtgatcaaggtccgttacgagtcggactactacgcatatcgcagcctaatgggcgcaggccgggatattgtccgcacggaaggcctgcgtgggctcttcgcaggattcggcgccactgccgctcgcgatgccccatatgcgggtctttatgttctcttctacgaacaattaaagcgacggttcgccctgatggccgcgaaaccctctaataatggcgaggcacccactgctgtttcgtcctcgtcaatacacttcgtctctggtggagcggccgccggcatggcgactgcaatcaccaatccttttgatgccgtcaagacccggttgcagctgatgcctgctaaatatgggaacatggtgcatgctacgcgcttgatgatccacgaggatggcatgcgcagtctctttggtggacttggtatccgcatggctcgcaaggctattagctccgcgctggcatggactgtctatgaggaactcatcctgcgcgctgagagacggtgggaaacgaatccccagatgggtctttaggcttgtgttttctgcctttcctgcccctggctatctccctccctcacatcatacccattccactttctgtattatagtctgttaagaccccattctagctcgcgtctgggtccgtgcttagagatgcatatctgcattgagattgacccaatgtgaggttttcttacacaaagctgaggcctgacatgtatattgtactgcatctgcatatactgcttatcatatcatccccgaccccaactttccatttatactaggggtatgccccaacctagctataccaagcctatgcccgtgagatgttcactacatgcgtagattagacagggtatacaaagtaaccggtacgacgagagaagatagaatcagaataaaaacatagtcatcagttcatatcgcgttactatactaccacatgctctgtgatataaaaagaaacacccaaaaaaaacaaacaaatcttaacaaaacacaacttggcacaatctcaacaagaaaccaataacaacgtttacatataccggaatccaaatttcttgtcacacatcaatcataggcaaaacagcgctgaataggaaaccatttatgcgaagacgcgcacgcggcccgaagggctcttcttccggaccaggaacatcttgtcctttcggcggtcgttgactttcagttcggtcatcgagtgggatgtctcggtgagcatcttggtctcgcgtaaacgtcgagtgtgggcgaagagctgttcttggaaatcgtcgtcgatccacttcttgatgatgatgtagttgttgtcatgctgtgaacgtgttagtctgcattgcacacacacggggggtatggttcttacctcatcccaatcccaaggcaggccgtaggctatcaaggtctctggcatcaagtgcttgcgatggacctgggatagtgttagttgaagccctagtatatagagggatgtatagagtactccataccttgatccatgtgatcttctcttccttcctctcgtcccttcgctcttccctcctctcttccctcctatcttcttccttctctttcttttcttcttttttcttctcgtcgtgttttttcttattgatgatgccgtcgatctcctcctcgctatagccaatgctgcggaggtgctcgcggaactccctcgccttctgcatggcctcctcagcctccctctgcttcctccgctcctgttcaagcttccactcttcaacagcagcagccttgacagcgagctccttcttcctcttctcctcggcttcccttgcctttcgcatatcctcatctcggatctgctgaatgagcttttcgcgctcctcctcttcttccttctcccgggcaagccgtttccacttctcctctcgcacaagcttgtcccgcgcctcttgctcctccgtcaaccttgcaagctccttccacttttcctcccgcacgagcttctccctctgtattttctcatcctgagcgcacgcaatttccttcaaccgctcctccatcagtttgcgtctaacctcctcttgctcagcagcggctctcttctccgccgccagctgcttgagctggtagcgctccccagccttgcgctcctcctcctcggatagatgcttacgctcgaagtgctgcagcttacgcagccgatccgagatctcttcctcgtactctagctcctccctgagcatgcgagagtcgtgcggatcgggctggttcacaatgatttgctcgcgcgaacgtgaatgctcatgtgaacgctcctgctcggcgcgccgagacttttgcagctcccgctggagccgttcgatctcctgctgatgcttccagagatccatgtcctggcggaggtcattgcgctccagcaattgttggcctatgtcttgccggatgtcgttgcgctccatcatgtgttggttcatagctagctcgtgatcacgttggaggggagaggctgtgcgcgagacgttgctgacggcgcgctcacggcggcgcggggcgacaggcacctgcacgatgtcttcctcctcttcatcctcgaagcggttgacgttgtacttatcgctgaaccgctgctgcactcgtcgagactggggcttgttctccgaccggctctctgatttcaacccttgctcgttgaaaatcattaccgccggtgcggtgggtgccactggtagttcatactcgcggtgtcggctactgatcgaggccgaccggggtacacgggtttggataggtggtgttatgtactcgcgtgtgatgatttccgggcggcgctggcgagaaacagagcgctcgcggatatgggttctgacacctgttcgccgggtggagacgtcggtctcaaactccgagtcgtgagaagaatactcgtcgtcatacattgctcgtacgggcatttttggctgggttgcgaccagtcgggtattgataatatagattccctgatagaggggcgctgggcggggttatcacagaagatacgagagataccccaagagaaagcgagagaaatgagaagtaagctgaagaataaaaactggctgaaatactcgaaatttgtgtacgagaggtgtgcgcttagatcttcagccaaagcgggggaggggttggggagaaagagaaaaggaaaaaggaggaaagccagggagtgcccttttattttgttcaggcgtcatgggcgtcatttttaattcacactgtatttcagcctcatgcataatctttggattcgactcgagaatcttttccttcgacagactccaccctctttcttatattcccttctatccttcatatactatttccagattccctcactgttgtactcggtacattgtccacactgtctactcccactccagcgttgggataccatcatcaccaaggccccacttcgagtccattctcgaggattgatgttagcgccgttgacaccgaggcactctaatattagttcttttagaccgcacattaggcagtgtcgcgacacagacccgcgacacatgaaaccacattctttgtatacggaactcaaaccagacccttcgcactaactttgaatgagccgttgagcacgcatccaggagacatcaggcggttactgaaaccgtgtttgttgtgatctcgttttcctgtggatcaccgagtcgcgtcttgaacccgtacggagcacttaaactgggtcccctttagcgctgagtcttccgacctaatatgttgtatccataatcgggacttcgagataccattcgctgcaacactgcattgggcaccaacaatgtctcatgtcttctccatcccaggctccatccacggttgatctatatccattttaacacacagtagctcgccgggtggggctttgcacccatggatattagtcgccgcttttacgggggcgaaggattgcgcccacttggactgagtgattcggcgaaaagcggcgggaaaacagccggaaatggaaatttcatggctgggaacgtgatgctatccatggaacgcagcggtgaacctgtggacgaggtcgggtgctcccgtgacgtgacccatggactgctgactcccgcacccgactggcttctcttggttcttcgtcacgtctataaacactaacatttgactacatttcaaatttctagtccttgaagaccagaatctatggaagttgtacacggccgtgtcggtgcgagtctccaataccccactacatcagtcttctgactgtacggagtaattcaaagcgactactccgtaagtggaatatcactagttatattcccaccacatgattggatgaaagaggggggcagtcacgtatatccatctttctgacaccctaggctaaagctatggagctggacaacgcatagctgcaaataatatcacaatcctttctagttgccactggcccaagggttggcacggcatttctatccaacgcaaaagacacaatatcagaaccatgggaagccagagattgatataactacacactccacttaagcattgctatcaaacttaatgttgagacacctaacccggaaatcctctgaggcctgatcctcgtactccagaatcatcaatttcaaatccgaagctagtaccaatgtgatcgaggcctgttgctagattgatccacttgcagattccaaagatggagcagacaaggcctgcttggctgtcgtacgattacgattcaaaccgatatacccatacccatagtctcgcccattctattctcgaatctattaattcactgcgtaaagcggattccgttcggcatctccgagatgaactcatgttgccatgagggagggacaggataaaggtcagagctcatatggactagtacgtgcccgactaatacaacatagtaccacagaccaacgccattggcgtcatctctgtagccaggcccattttacccggacaatgacgtagatattggcagcataggcgctcattcctggaatgagaactgataagacatgattcatgtgacaataccaaatggaaatgttttttgtggactttgcgctactgaccttttctaccttggatccttgaggaccttgttgaagtatactttcgatcagacccctttgcatatcagccctatcaaattgccattttggtgagacactatgcagatattaggcacctaccttgtacgcaccttatcgcgtgtcgtgtaatactagacagcctgaaagaagtaaatttaaacgtgcttcgcatttgacccttgcatcgtcggaaatggcagctgcagcactatgagctactaccccacaatgcgcttgacagctagcacaatgaacatattaaattgggatgttggcaccgaggctacgtatttctcgttagacgaagatcaatcaactcttaaatccaggattaggattagataagaatccacagaaggggaggatacctgtgtaagcaaagagattataatggtacgctctttcctcgcttgattcattcaagaaagacatttttgcaaacaaaactccgggtatctaagtcaccagccggcaatccaagtatgtatagtcgccagaacgtgaccaggagccggacatagaagggcagatattggaccttccgtgcatctccccggcatagtgtatcatatccaccaacccatcgcaggtccgcccggaagaaaatgacagagcagaatcagccttgtccgttcctgcccattaagattcacattcgcgagaatcgctaaacctttggtataaagataccacaatcaaggatacccgccacatgggagcgcatcgcgttcgcgtctcgctctcgtctcatattcttattccaacaatctactcacgccctcccagacttgagaatctgctccaagttctcacgactcttctggttcgtcgtctcgtgatattgcagcttcttctcgaggttggagatctcagcggtggcctcgccactctcgcgcacaagacgcttgttgactatgccgacgggaacgttgacgaacctagaacagggcgataagtcagtttcatttcacgagaaaaggggccaatgagtgatctcgccgactgtctcacagtttcggggttgcgaaattgaaaacaggaaaagaaatgtgataagaaacaaaaagccaggataggaaagagaaaacaaaagctcacattttcccgacaccctcgtaaacattcgtatcagaaggcaactcagacaactccttcgatgtaagctgtagcatgcggatatcgcgctgcttggccgtcatatgagccttggtgatactgatctgctgctgcgaggagatcgcacgggtctcaatctcctggaagagctgtagttgtttagagccattagcatttgcttgtctttattggaattgacgtcctcaaccggaaacagagacaagaggctgagtgagaccgaattggcttagcacaccgcttcccatgaccacctgctcgcggtatccgacccaaatatgtaaaatgattaagtctaagacacaccttctggagagcttcgttgggaatcgacatcttggctgtggattgtcttcggagcttggatgcggttgaggggtaggaggtaggaggggtgcggaggacgggcggaggtgaatttgttttgttgtggactccggattagaggtttgattttctcgctggaggaaatgggtatcgatcgattgatttttattgaactgtttcgcacgggtgtctctgtcaaatgtcttggtcaacaggatcaattcgacttgctcggcgaagccttggggttgaggcggtgggcaagcggggcggtggagtattgcctgacttagggctcgaggtatacgagaggtgtgtcaggtctcagagagagcatggagtttgtgttgggcaaggcagattgatgtgtttatctattttatgtgcctctttggttgaaaggatctaactggattagatcaaggttgacttcagacattcacactttatgaactgtctaggaagcgcaggcgcaatacacttagagctccttgagttaaaaagagaaaaatgggacagaggtctttggtattcaaaccaatttattagaaagaaggacctatatgttctgtctagcaggaacgacatattcatacaagaattgtatgcaccaagctcatgacagtattttggacttgaatagcttcattcgaagtggctagtcccattccaaatctcataaataagaaatctagcagttttgcttcaaggggctaaacaagtttgcaaaacctggcgagctcataaagacatggaaatcactaggaccattgcccatcgggaccttccagcatatggcaaccgcacgtgaatctctcaagtagcggtgtaatagagtacgatagaacgagacatcataatattccctgcaagccatgagatccaagatctgtagggacatcactgccctttacagcatgtgaagatccgcgtaggctaactaatctaagaccggtgacaatctaaagcctttacctaatgtctactggtttcaagatacggagtagagagagatttgaatggatatttgctaaaaaaaaccaatgggcattaaaaaaaatcacgattcctcccagtgcataattccttcgacgtgaaaatatcagaaatctaaagaccagaccctaagtatcgaatcgatttccagccagatccgaaatcaaatgaaagtaagacaaagtccagattgatgggcatgacagtatgaaaagtaaaagaccgaaccaaggagattattcatgattcccgtacgcccagactccgtctcccattggcgtggccgactctgctcatgttctcatccaggagtacagcagtaagttggtcagccaattaatagcgtgggagactatgaaaggcccgatagccatgggcattgcttgagtgcttagtagttgttagagttgggctcagtggagcaccacatctcgaactcagagctggtggggtcagccatgctttcatggcgagccatatcccatgatggatctcggccttcgaggctctgcatactggggaggtaggcagaggtcatgctggaatgcgcgtatgaaacggcgccggaagacatggccggcgccgatgaggctgtgtaatagccggttggagtctcgtcagcccaggtgtatgagccagggttggcataggaaggagcggacatggcggaaactccagactcgccgttgctgagaagacgggggtccatgtcgtgcatggggagaccgtgcgagtgagtaagctgaggctggagcaactcatggtgagtggcaccagggagaccggcgagggaagagccatatcccatatcctgttgagggctgttggagcggtagtgcatgtctccgtaggattcggtgggctgcatcattgggaggccactgggatggcttgtgttttgccaggaagggtgaatatatccgggtgtcatcataaagtcaggcccaaatggtgaggaatcccggctactatcgtagtaggcctcttcgaagctttgggatcgtgagtgggcgtaaggagacccgcgatacgtcgtcgatccaaggtcactttccatgtcagagaaaccgccttcatcggcgacatgccctggtgtgagggcaggagagccactatcacgtcggctggcagtggctgcggctttgttgggggagaacttgtagttaggatgtgttgcggcatggttgtcacgttctagcttcgctagatcttcgtatttccgtcggatctcaaccggctctagcttccagccctggccagcgatcttggagacgatctggtggttgttcgcacccactagtcgcttggtgcgctcggcatatgcagaccgataaagcatgaaggaattcatgggtcgagagatcttcccgttcttcttgcggacctcgtcctgtcgctcagaggccgatcgagagacccaggcgtccatgtctttgataggagtagtgtgaaaagattcagtaagctgactgatgggtccctcaagctggatacctgaatcggagagttctctccggttacggttgcgccgctgtcgggctgccctgactggagcgtctctgactggtgttttagcacgagaactgggggaccgtgaccaagctggcgaagaggtcctggtaggtgaccccattgggatgagatcttcatcagataccggaggaggcgtggtgacctggccagacatgatctatcttggtcagtgtcggtcaatggagaaatgggagtaaaacttaccgattgaggaggcatgtgaggataaccggggacggtgtagaacggaggagacccgtagtgctgagatggttagcattgctatgaggcaacagccagaagatcagacttactatttcttggccactgatttcaccagacatctgcatgttgatgcacactgctcggtacgttccaggaccttggaaggactcttcgggcaagggatgtccgtctgtagattggggaggtgtaggaggaatgggtcttgcaaccaaagtcattgttgtgatgctgatgagataggataaaaagaggatatgagttgaaagctagggaggaaagaagagaaagagggtttccagaaagaggaaagaagtggaagaggtgtagaatcaagatattctctgctgtcctacgcagacgggtttgtctcgcagttacgctctcctgaaagagaggtctcaaacacgactgcagatgcacccgctggcagttgagacacgcactgcaacaatccaattggatgtgtggatgtaggtaagtatgaagaccctaggtatggagatcaagtggatatgttcaaagaggaaagacaaaagccaaagacttggatattgccgattgaaagatgggcgggtctcgcaataaatagaggagaggggagagcaggcaagtagccagagaggctgaaacctccagaagaaggcctggaatacaatccgcactctagttctggatgtgattctgagattatttggattaaatcgaaatagaaatgcaatttaatattctcattaatggaattaatcgcattttccagatttatttaattggatttcgcttttctttatttgatttcctttcctttcccttttctactctaaatccagtggaggcgttcatggcagattatttaccactttggtcctagtccgtgctattggcgtgataggctgcatttgcaatattccattcaatgctgaaatagcatggagatggatctgtgactgccctatatctcaaacatattgtctttgtgccaaatttggacacctacaaatagcctggagagaaagaaaaagcttcggctgggtgacgatgtacggctccagtatggagccattgcactagggcagaccatgggcctgtagggtctttccaccgcccgagacccggggatgcaataggcccgattaaaatggaaaaggagacatccggagccggggtaggtggaaatgtaaatgtagtgtgatcttagcttggatgcagggtcgttgggatatttcttttttcttatttttattcttttatacttgacactgacactgacactgacattcgaaaaagcaaccacggggaagcgtatagttagcagatgcaagtaaccagaaagacactagctcggacagaaacgggaaaatgaagcactagttgcatgccatccgttgctgtcaagcgcgatatacgtgatactgtacggcagacgtttagagaacgtcgcagagtaaagccaagcctgcaagacatgcgaaggatcatgacaataccagtaacctccactcgctatcacaccgattcgctcgtctcctccgtacgagtcatgaacgaccacttctatcgaggcatatccggtccaaccaaccaggcgagagaactgctccccctcaaagttccccagtcagcctgcgccgagcaaaccatggatggctatgcagaaaaaggcagcagtctcgacggccggtgtgtatcattgggtcccggggattcggggagtcgggggccctttttcccttttccccttctgccgtcttcattaatgtaggtctgagcttcggggggaaactcttgtcccggtctatcgcggctgtagtggagtgggcccgcgctgatcgacggtaacctgccatcgcgtccagggttggaatcgatatcgtgaccggcaaacccaccaagtccagaccgccacatccacgctgattggctggcttcgaccggcgtaataaatccggcgaaggcccacgccaggaatggctcgattgattgtggcacgggggccatttgctgggcgtgacctgccgtgccctcattttgactactgctcgggttcccttccgtggatacgtctcggatcgtgccatttcactagatggtacggggtcgattgagatttaacttgcacggaaacgccgatctataatttgtaatcttctcatcggatttcggcttgtccaggtctccagattcatccgtcgatgttaaaaatccaacgccacgggaagtcatgaactcattgaacgcatggaagatctccccgaccagtgcttgtcagatctcgccattccatacatgcacggcggttcgcgcttactcggggacatactctgaactcatttccagatcaagattagcagatacgagcaattgctttgacggtgccccaggccagaccggataggccatggcatacaaggatgttgccaaagactggatgtggctgtttacaagtacgacgagcgcaccaaccaagccctgcagtttttctagaagactatcatcccccgcggactggctcgtgggctacttgggaccttggacgcaggaaccagccacgttattgcatgccctctcgccgtgtggcagtcttggccatgcatgttttctttgtctggccctcccccctgtccttgtcgggcactcgaaaaccgcctagagggacgcagcacgtcaatcaattgctagaatagtggagtgtagatgccatgtgtgatctacaactgttgaaggctgagacctgcagcatgtccatgtgggctttacccctggctcaaagaaggtggggagttgatacaagcctgcgcattgagcttatcttttgacctttttttaatccccaggtggccctgtaagcatcttattcgtggtccatatgccgggatggtatggggctgagccaaaacggattccacgtgtttttgaatgatcaaagcgatcaaagaaataacattgagaccgtaaccaagctctttccgccgactcggaggaaagtatttggactcactttgtagtgtttcgtataccaatcccattcgatagtcgaaacacctccaatgccttgtccttgaagtcgtacagcccttagctttgatgcagcatatccttaatccaaatctctaggaccaaaaatgagggatcaatagagtattctccgccgtaccgggggatcatcggtgccaatcactaaggcgctgtcaaccggaatttcaaatcccgttcccaacaaggctaatcgacgacgaatgaggtgctcaagcgtccgagccattgctgcaactggctgcgcactcacgaactcttctctatcacgtatgaacccgattgacagctaggatcaccccgctcaagcctccactgatttccttcgaaaaccttctagaagtccagagccccgacagaagaggataagccccaactctaaccgtccgttggtcgcagttcagtctgctgactcgactgcgttcggattgcacaatgtgcacagactcagtctgaccggttaacggcgtttcatgtcagtccttctctttcatccctgatcgcctgtccaagtgtccaagtgtttcgagtgtttctaaagatatcctcgtttcaagttattctcgcgttcattgttgctattttcatagcgatagcaatgatagcatgggagaaagagagaaagagaaaggggccggggatcgatcagcacggggaaaggagatctacatttgataatgaaaaccagcataaaagaagggtgaaggggcggactagcctcagcaactttgttactcacattctcattcgatgccatctagacatgttccccgataccccgatgcccatgtccgataccctgaaccttgcaccctagtccccatagtcccacgcctttagcaggggccctggtcaaagtggccaaatatggctgctgctcttgttatcttgcgatctgcctgtccttacctaacagataatcggccatgaaagggcctgcgtgtgtttaacttcgggcgtagctgcattcgatcaccacacacgaacgccatgccacctgttgaccaggttctcgaactcaattgcgagttgcctcaccacaagtcgaccacggcccgcggtcaggccgcgatggattacgagagccagaaagagcggggagaagttgcacaccgggattgacgaaactaaaaggagacccgtaggccgtagaccggagttagccagcagccaacggtaaatcacgcgcaaacggcggatcgtcatttgacgttcgcccgtgggccgtgatgggccttgactcttcttcgagccccatacaacctaactctatcctatcaaaccctaacctttgagaaaactatcgtggaaaagaaaaaaaaagactaataatgtccccgacaagcgacgaccgacatgggtggataagatggtgagatcagatctgggttccccaattcccagaccgccacgaggcaatcctcctgcgcaaccttacacaacagcggctagatttaatttgtcatgcttgtataccggggtctgatgcgcttgatacccaaaggggagaatgagctgcgtgcaataatctgcaagcctcagccatatagccaaaatatagtcctggcagcagccaacagttgggatttcctcacgattggtgcaaatttgggaccgttgacggtttatctgccagaatacgggcgacgaactatgtagtttttgaggcgtccttcgtgctgcgtacggagtactccgtagatgcatctcttgtcctgcgctatttttcctgctatcacaccttgcctgttgtggttaatgtataagttgtagaagtcgtgttatccctggccaacattgactacacgtcttcgttcctccccctcttccctcggttttctctcttttaatattttattttgccaattcccactagttttacataggggctgtaatggacgtcgatcttcatatcgaggattcgggggaatagactttgcatcccccctcagatgtggaaagttgatatgtgtgatttgggtgtcacaactctaacgcccgacgacccgttcctcggagatcggactgcccgagacgctaggtatgtttcttgtttctgattgattaacttgtatagactgacattcgcttgtattgtccaagatcggtcgagatggtaccgtgtttcctacgagcaaagtccaggctaagagaaaggagtcagagagaggctaccaggagaaattgtcggagatgctagatttggattctcgggtatagcggtctattttctgtgttctctgtctttaccgtggtcaagatacttgatttgattatcggacgaatgctttccatggtcaacattctccgcggtcaacaccagttctccaccctcagaatcactgaaatcaacaagtacaatctaacgcccagagctagccggatgaaccgagacccgatcactaatactagcaactcaaaagtccctatggggtactggtccgtaccccggcccagattaaccctagaggaccctagccccatcgaccaggaccctggtcggcttggcttccggtcacctgttcagagatcgtccgcggacatagctatctccggaccatccatagccctactgtaccttttacaatgtacgttgtccagatatgacccgatcggcgagacgcgttactcaatttgtgcaaatcatggacattagagttcgccgaaagctgaaatccatgactcagacgaatcagagacatgtggcatgagctagaaagggcgaggccaggcgacgacaagagcgaagatcgtgggtatcagagtttcgcgcgacgtatggcgatagtgtcacccatccgtcacatccaacggcgccttgactacggagtacggagtacggagggcctagtgcagggtaggactgctccactgcgggtatcggtgcactaactatgttgtatcagtgggttcagtatgcgggctttcggctccggattctggcgtacctatgtcggtactgattctcagggaaaacggaacgaatacgggatacgaggggtttttctctacgcgctaagagaaattaatggctgcctcatcgcgaaacatcctggtcgttatccaaattggaataggaatcccgatcttcaatctgtaggacgggttgggttcctagttgggtctggtggatttgaggggcaaacgatgggacagagggattctccgcttgggaatatgaggagttggctcttgaagcaggggccagtgcttggtataatattatacttctacaacatataactatacgttgtagaagtatagaagtagatattgtacctgatctatgcatatggtggagtacgtactttgatcaaagaaagagatctccaaagacaaatgcaattgtctttcctttcgttcaaggaaactagcctactagcctaatggcttactggcttactggcgtagctaggtagtggggggtaagtagtctgtggccacccgtgtcgttgacaaatacttccctgctcgcaatccattcttagacttgcttttctattttatgttttataatcatgacgtctgtattcaaaatctgttatatagctctccccatattccatagctatagcactatctttgtaagcatctaactctccagaacggcagttacaccctctgagtggccgggccggactgcgaaactccactctcgctgttctcccactttttcttccacatttccagacaagaggctatgagctgcatgagtggagaaaaggatcaagaacgcttggatcatgatcgtgtctgccgtgtgaacctaataatacgtctatgtgccgtacttagattgccctaagcttattctggcaatgccacgaaaggagctacggagttatgcagtgtggagtacatatggagtacggagtctccgtaacgaacagactaaatctctagatcccgaaaagcgaaccccgggtctattttctgattggatcggtaagcttcattttaatagctaatcattgccttccaattaatatagttatccgtccctggcggtctcgattctcagccacaagaaggcgaactaagtggctactccgcacggcaatgagacatacaatatcatagctacaataccatagcgggggattcgggatttacaactccttcacttgatcgtagatcttttggtttggacataccttggaacgtatagatgtgcagatatagttagtcccagatctgatcttgttgaacatcgggagagaaaccatggtaaacaggtggataatgacattgacattcccattcacaccggagctcgccgtctgtagaatccggatattgcggatattgtagtctatggggtatacattcgcctgtgttgggttcatttccctaaatcgttcattttattagaagtttctctattttcatcattagcctaagtactccatacaatccacaatatccgtgcccaaccccctagagtaaacttatgacagcaatgacacattgacaggacggcagatcaactaacaactaactagttagtcctgttacctgtattacaaacccaaatagctgagatagggggcaagggatgagcatgccgctagcgctacaacatacacgattcaatgcatgatctacgtcgatcgcctccggttagcgcctgggctaatcgctcgcaagtaggatgtaagttgactgcgccgcatgctagacccgaccgagtaggctagatgctatcgccatactttttccaacggctttagtgtatcggtaatatgtccagagtcgtacggcgtatccgtacataggtacaatcgtggagtttgcccttgctcatagtcatcgggcatctgcctaatcctaatacatgtggagtgggacatgacgatgggcgggaagaacgttcttttgtcactcctttttttgggtctctcctttttgttattattatctccggagccgatgcttaggctctattgtgtttgtggtaaatgaaatgagacaattaagtaaagaaatggcataatatgattgagagacaggggctggagctgcttcaaacgctgtgagccgcattccgtggtagcacggagtactacctagctaggtatgtatgtagctcggtatgttagtaggcgtatacggttggctgtgcagctgggtaggactgcgtttaggtattgcttttgcagcaaggggtatatgtcgatcgacgtatcagtcgatttggatctggactgggcgtcagacttttgtgttgacgaccacgttgttttcgatagtcgataggatggatatgcagccatcttgtaaaggaagcagatgttgatctgctttatttgatcgactgaaatggtttacaataggttaaactgtaagcacttagtttactggtttgcatatgtggctctactacttggacagggctgcatatatagatctaagatgtatacagccttgtccaaacatttcccatctaccttccatcaacttcagcaagcaagtagttcacgattaatatcaaataacattgtctattaaaatacacttctccttgtccaccaaatggtgcccagggccagaccatctgaaaacgccgctcgagtccccatccatcttaatgcattgtaaaacaggaaaggaacaaacaaaaaagggtctcaaaacgccagcccaccacagtttcaagcagccagtattcccacgagacagacccccgacacgaacgacaaggggaaatctcgctttcaaaacacggccattcaacaagtttgactgcaatcgcagaacttttggaaaaggcaaaaggaagaacacaagaccacgagcgtccaccaggccaagaaggcttcgttagacagatatgaagttcgatgtatgaaatgtcgtctccaaagggaaaatgactccggatcgcctggaaaaggataccggatggataccattcgcgcacaatgatccacttgcgcaacgttctgcaaaagctaaaacagacgtcgaaaaacagtgcgaaagcacagatcaaatctgctcaaaacgcacggtacgacttgtggctttgggttccgatgctttcaggatatatccataacggtgattagatgttcgcagactcaaaaagccaagaaaggggccaatagaaagggtatttggaaaaaacacatgctgttcacaccgttgcgctagaaactcattggttttggccattgctttcacgccgaggcgaaggaacaggatccgggtactgggacgtcccggaggccaagggaggaatgcgactcagcgatggtgacgacatcagatgctgtccattgctctggtagtggtggctctggtgtagcattgaagcattctctctcagccggcgttcctcctgctcaggtgtcatgcacttgacaggcggggggatcggagcatctggggagctgcggcccatgagctttgggctcggctccagtctgcggatgggcggcaggactggtgcgcctgccatgctactgccagtaagcggacgaggtgactgtttggtcgggctaattcccgacatagccatgccgtgagaactctgaggaggcgaagagtggttaccgttgggcgtcgtggcagagaaagatggatagtggtgagacatcgacggagtagctgtatgacctgattgcggacgcggagtctcgaaagaactccacggagatgtatggcttgaaacagacgggaagccggcaatagggccaacctcagggttgccctgggttggtgacatagatggttggttttgaacaggactttgggcagagtgagaggaggagggccgcacagggaacgatccaacgggcggaagttgaggagctgattgcctaggcgggaaggagtgctgagaggaggatggccgcgcgtgctgctcggtggtatgcagcaagcgattcatgccctttggcggggaaactggtggacgaggagggcttgaagatggaagggaagtgtgatctgtgttatggacccggcgctggggagacgcaggaggatagaagttgccatgactaacagcagacgagtgtagagtgggttgtgttcttgagggttcgttttgaatattagatagagccagatgcgatttcttcacaggcgagggcggagcacgatcttcgtcatcctctaacttcagcttcttaccgactggaggagcagccgaaggagatgctgaggcgctgacccggaatctgaggggtgggagtttgggcttgatggaatcttcctctttttgcttgcagtctcggcagacaaagtgaaagtcttccttttcggccgcttcctgtgagatcccaagacacttgctatgctgccaaacattgcatttttcgcaggcaacactgtgacttccatcatcctaggaaaaggttaggctaaggctcaggtgcttggagactgaaactcaccaagttctcgccatacactccacagccagagcaatcaaagatccactgatcatcttgggtaagccctgccaggttcttctgggacttctccaggtcagcctggaggtttcgggcagacaccctactttcacccctgtcaattctttcttgttcttcggcgatcctttccagctcagcctcatgcagcagtcgcttctgttcacggtctctgatgcggtgctcgcgagtcattgtacgcgactgtcgatcttcttcaagctgactttgccttgcctgctccttacgagcctcggctaggtcgttttcacgcttctgggcggcttcggcagcctctcgatcctgtcgttctttttcttccttggcggcaagtcgactagatctcttagcaccggcgacaagctgcatattcagaagctccttttcacgcttctgacgcttgcgctgctgcgcttcctctgccttctcgaggataggcaggacatgctcaactatgctatcgcgtaggtatttctcgtccgcgtccttggttttctggattgtctccaagaaagcctggtattcctggagtgtgacagccacacattcccacttgaaaggatctttagagaaggccgcgacggctgcatcgttggtatccttgctttcctcgtcggaaccctcttccgccgctgccgtagatgtacgctttgacgttcttgatactcgagaagaccggctctttgccttcttcttgggacgctgaggagggggaggtggaggagggtcggtgcgacggtagaggcggttgtcatctagcacgtagtatgatcgcccttcgcgatcccagccaaactcttcaatacgctgggagaggtcagtatgcgatcatcaggggtcaaatctatacgagagatagcttacccattctgtctgctcggtttccttcttttcgggcatcttgtcgcgaatgcggtccgcgttccagaatgtccataccgtcagctggtggaggacacggatcttggtgaaaacatcgaaatacaggaacttgtttggttcttcatcgtaaccgaagggattagtgatattaggtgctttcgcattgtactggcgtcgggtgtattcatcgaaattgtcgaatctgccaacatagtagtgtcagtgagactcaggataccgagaaatgtgttccagtaaacgtacgtaagaccgcgatgcgacgaaatccacttgaggagacacaatccaatctccagtagtttatgagagggctcgggtttgagacattcgacttctagatcctggcgggggcaaaagacatcagcgataattcaatcaagtgagacctgctcgtgtattttctcatcaatgcgacaagaagcgcacagcattgatctcagtccagaccatgctaatagacatacctcaatcccaaagtcctcgtcaatcttcatgacctggccaaagatagcaatgtattgcatgaggcttgcaaatgcccagttgctcctaagctgtgaaagcaaaccaggctcttctggtgcctgttgctcggccaccgaggcgacctcggagtgggtgcgctttcgcgatcccatcgcggcgggacaaccgttaaggccggttttctcaagggtgtcaatgagggggttccctggaacgaaaatgtggcggagatgaaagccagagagtgtccaacttccaaatgagaaattcgagcgtaaaaattgaaaagggcctaagaaatacgaaggttgagtctgcactttttttcgtgtcgtgaggcaagacgatcagtaaggcggcgcgtcaaggaccgtgtcacgtgaacagatgcgtttgtcgaatttagcaaggggagaagggaggatgatagctgaagaggaaatttaggggatcatatcaaattggtctaatcttattctcaaattaaaagggatctatacaatgagattatgcaaacaatggaagatcgaatattcatgaatcggagacaagtacatccatgcttttgagaacaaagtcgcatatacacaagtgaaaacagaaaagaaaaaaacaaagcagacgcctggatctttggatatctctcgctttcaaaggtctatctcacacagagcagttggggttcgtcaaagacgaggagaaaatgcacacagacgacagcgccaaccagaattcgcgccacgacagaagagttccgtcgaaaatgaagatcaatgaacaatcagaagaaaagaagcatattcccacaagcaaaatgcaaagcaaagatagaaaaagaagaaaagaagaaaaagaaagggacaagaatacattaaacctcccccaacgcagattaccgaaccctcaagaaacccagtataaatgcggtaaagagagaaacaaccaggaatgaagaaaaaatgaacttggatccgatgccctcaatcgatgacatacctcatgcgctggatccatccagttcttcaaccacaattttgcgccttgtgtccgttaatcgccagaagcctttcccatgcatatcataaagtaaaatatttcgggagaaagaaacagatgcttttcgtatgttacattgccggggctccatccgagacagtgtcggacaagttgataaggagttgagccaggcagcgcttggtagctgcatcgtcacggaggactgaggagaaggtggcgtcccggagaggttcggggagacattgccgcaaggcctctcgggcccgactgttgtcactgagactgtatctgttgttagagacacctatgaagctggatattgcacaaggactcaccgaaggaagcagcgcacaacatgcttaagaaggcggacagtctgttgctccaccaactgagtaaccatgttgctcaggacagtgcccacggcatagaatctttcatatgtggcgcaaatgtagcccaagcctatatcatcaagaagaattttctgtacgataaagatagcgacagttttgctcagctctgagcccgtttccatgatgcgaaggcagagagggataatctccgtagttaggaggaagttgatcacgtcagacgagtcattcttcaccaatgcgccgataacgcccagcgatgttagtcggaggtattcgaagggacgagacttggaggtggtgttgaggaacgggtagaggaaaagagggatgtgagctgaacgaggaaatatattagtaacctggtttgcacgggtcatgataaatttttactcaccgttcaagaagagagtgcgggtctcattgtgggaggcaacgcattgcaaaagcgccagcgcattgcagactcgatttgacgcggcggcagtcaactgagaagggttcaagagtggatataccgagatgatctcttgaaggagtgcagtcatgacacctgcaagtttccgaccgttagttattgtagacagggctgggcgcacgttgggaatggagccataccaaaagaatgccagatgaccagagccagttcggggacctgctcccgcttcttgctcagctccatcaaagcggattccctgcggtttggatctaatagctcggcgacccaaatgaagaccttgcgattctcctcgctgattccaccgtccatggcggagaccgcatttgacataccatctccacccatgccaccggcgccaccggctccctgcgcatggttcccaccaccattcccgctcatggcaatgcggccatagtgttgttgctgtgcggcggctgcggcggcttgcacctgggcgtgctgttgggcgaccagggaagcgtgctgctgctgcgattggtgtgggtgcggctgagcctggtggtgctgttgctgttgctgatgctgcatccacgaagggtcggcctggggatattgatgttggtgggagaagacgtgttgggtctgcgcttgaagcatggtgggtgatgagtcgtttcggagactcgtaatactccgaaggatcggaactctagcgaagcgacggcaaaattgggtctgggataaagttgaaatggggttaataaggtcaggagtttaatcctgagactgaaatcattgatgactgaagacaagttgcaagaatagtggtagaatgggcagattgggtcgaacaggtcgaacagaggagtgtggaggagggaaaaggcggaagtgaaggcggggagataaagtgcctcccctaagttttgtgtggtcttttttggccctgggcatgtctgtcctactgctatggagtccttgttctgtagctctataattattttctttgctgttctttatcttttgtctcatttgactcggattgaatttgcattattggtgttgtcaaacctgcagggcatccaaacagagcacattgttttctgcaggccaaacagctttctgcagccattacgattttccatgcagttccaaggttgctcatagttatttcatgccggtgcccggggagcatttacagctatcagacagtgataaacaagtccaagaatcatattctcgtgtcgggtttgtactcgtaatctcatatgtacatcgtagtgccaaacataaatctcatatcgacatcgaaacagggcaatatcgtcaatcctagatcaaatccaaaaaaatcatagtgtaaatcatagtgatacatcagtcacattataaatgcagcgccataaatgcataatcgaaccgaggtcgtcgaactgaagacagaagcgacaagactctatcatggacgggtgcgcgactgtcgtgaccgtcgcgtatccctcgttcgtctgtcagaacttcggctacctgtgaaagagaaacgtcagtaaagatccttcgttatggggatatgtgggggcggacgcactactccctgagtaatagtcggaatagtagtagtatgaacttgggtaggaggactcggtcttggcgtcgtcgtgctctctcgatctcctcaatcccaaacatagagcaagagcaccgaagataatggcaattgtgccccagccccatttggactctttcttttcgctaacgtcgctgccttccgcggctggtctggatccgaaccacgttcgccgggcaggagcaggaggaggccgactaccatgcgagtggtgggaatggcgctcttcaacataggttgtttcctgtctgcggcgcttcttaccgatgccgagcgctgcaagcaacccagccaagacgcccctgaagcagatgcaggcgcagaggagtagcaacaagaacgcaccgacaatactgccgatgacaattcctgcaatggcaccaccactcagtccgccacctgaggcttgggccccaatcaaatccgccccgtctgttccaaccggcgctgtgaatccctccgtggtggttggggcagaggttgccgtcacggtacttgccccattgctcgtccctcgcacgcccggcgtggcttctgacccggaatctgttcctgtagcagtagcagtcacaatagccgaagagctttcagcgacacattggccattgtcacattcttgcgcagcgtcgcaacaagtcgtgccgcacgtcgtctcgccgaggtcggctctacacgtgcccgcgcttgtagtagcagctatctggctgctccatacagaggtaacagttgtgaggtcggtatttgtgagcacgtaggtcgttgtgtaatattgatagtccccactgctgctatctgcacagacggcctcttgggcactgttggtactgcacgtctgaccggtctcacagcaaagccagtcattatagccacatggattatcgcagcgcttttcaagcctgttttctccgaagatgtctgcttcagctgcgagcggggttgcggctgcgtggagcgcgtagttgaggagtagggaaagtgtcgagagcactggcaggacggataaagatcgcatcgcaaagaaaaagcgaggcaacgcttgccaaaattcagtggtgaaacactcgaatcggagagtctgtggtttagactggagcggtggtcgtagtagtcttatctcactcgtatactggagagatcttgtcgatcacagacaaagatcaccaaatttttgaaacgtcaagatatgatcggaatgcagacaaagaataaagaagaatgagagaagtcaagagaaaagagttctagtttgttagctacacaacatctcccagcctctccagtatacccaaccacccgatttcctaccaatcgcctgagactttctttttatccggtggctgggactcggattaaatgagatttactgcattccgattagcccaacgctattttccgcctcgaataacaagccctgggttgcccccctaccggcgtcctgtcagaagcgatcaacgggttggatgcaggttccaccccgcatggcagcaatccgcttccaaggctatgtccaacaccgccatttcagaattgccatgactcaggtctaacactaaacactaaagaggaacaatccacttgtgtacgttgggcagccaagagtctcgtaaattgcagcgaagcgtggatgttgtggatgtcggatattccgtgccaccaatggcagcccaacgatgaattgtccaatccgttgaagaccctgacatacgattaaacaggcacaggcacaggcacccaggccccggagagctgctagagggacatcctctctactttgaaagcgatcaaagaatcaaaacttacccaagagaattattctaatcgataattactactctgtcatgccactcccttgctaggatggttcttttcttgctacaacatacaacatacggaaatatctctaacaacccatggttgcatattgaccgctatttcgatggctccgaactagcgataatatcaatgacccattccattccatgggaggtgcaagtgcggtctgccatcgcccccgaagagtgtcttaggtatcgtcagactgcttacgtgaggtcatctatggatggcgagactcctcgcatcgccaatattggccaaattgaaaatgtgcttcggactatccacgatcttgctccctgccgcctcatgtcaagcatcctgccgaagccttgaggtattcttagtctgcacgtctgccagttggatgagattttgaacccggctacataacccagctggcatgcggactggatgcgacgaactgggccgagtaagaagtacctgtgcaatgaaggaattcaaacaggccctgatgttgcggagcatatctaatcaatttcccactgttgacaataacgccatcaaccatttctatgctcgccaaccacatggtcatggattgaacagcaatatgcagtctagttgtctcatcttgaattgttactgtctaatctatggtccatcaccaacttggaatgaatcccccttgatccaattaccgagatctttaggcaattagtttgacctgctaaaagatatcctaggaatgtgttgcaatgagctttgggaaatacttatgaatcagccaaagacattcctttgcttgtaaataacctaggaattatgtaactagtaccaaacatccagcttacacggagaaaaggcgttcgtaattatggaatagattatcaaactatgtatcatccaatttcacacattcatcttgacaaacaaacctcttactagactctgccactgtcttgtccacacatatgtactccgtatagttgtaggcggtcattttctgcccccaaacagggattatattgaactttaaggatgtcttttcgcccttcggggcatatggtcaaatgaaaatatacagagaagattagcatggcccctgcactaaggatgacacgctcaatcaaagagaagctacctattttttttcttttacaggtcctttttgaggttatacaggtgtgggtcattttgacgcggtataattggtcttacgccatcgggaagtcacgtgcctgtctgatctccacggtgggtgtacgaatcccggaccgcacgaaaaagtggagcatttatcaccaacccacggtcaggtcatggcggctctgtgttatagttgaaaagaatgtcgtccagcctagatagtaataagaacaaaaaccatgacaacttaacgtgcgtatatccttttcatgaacttaccagtatcaaatttgaggttattcccaccttccttttgcttctggaatatctgttgaaaggtcacctgacctccattgtttgctcctgctacttattccacaaacctgtagatagtttcttccttcttacccgcaactgaggtcttctataagtcatatatatcatcgagtgggttctatataagccctttctcaacatccttcatatactttaccccattcttatctactgagtcatcatctatacatcttgggttaaaatatcagaacttcatcatcccactatctatacataaaccgagcaatgtgagccttctggagtctaggatgaatgtatctctgacacttgaacagcgagtatatcgaaggattctacctgttccgacgtgggggctcttgaaccacgcggtggatgagcccgtcgaatcggaatggcatccaaacactcggtgcggtgatagcgactacgaatatcaacatccgtcttggtgatcacaagtcggcgggtacctcttatcggaaaccccagatatggcaatggtcttgcgaaaatccccggtagctctgacggtcgtcggagaaatgaaggtaccacaactgtcacatggaagacggcaagtttgtttcctgtgtccgcatcccgggcatgggtgtctcaacaattgccattttggcaaccagaaccaccgtcgcgattgggacgagggtacccaaaagaaaagaaacaccagtgaaacaagaggaagacgagcagcttgtcaatgattcgaacctgaaaccagccaaccgacaatccaggcagctgcagcgggtatagaatgggccatagtgcataccatgaggacgattggacaaatcgttaatgagtctctgctgaaccttctcaaagctctcaccatgaacattccaggtgtgtcctattgatagttgctgagataaaacgtgaagtcaaaagctgaagcctcacctacttaggtccacgggtcggatgcccaattggctaaggcacaacatggaccggatctcgtttagagtagctctcgccctcttctctcttcctcttttccctccctgtccattcgcacggaaccgaatcagacacactgtttctcattatctacactatagcagattcctattatctagtaataaaaaagtcgaagcagtcccgggagatggcatcgaagggacatcgaaccaccacaaggaaggaatactagattatgttttggttataatgaagacgaacgtcgtgcttggggaagttcagatgcaaagaggtgatgagtcagggtccatcgtgtcccgaagatcaaaggagctggggccgcgatatctgagaagaggaggaaattcggactcggacggagaggttggagaggaagaatattcagcgagaaatgggaattaattcagacatgcaatattcccgactcagtaggataaaagaaaagtactgtctaacccaggaagaagtcaacggaagaatatccagatattctcctcggagaaccggtcgaccatcttgagcgtgatattgaacgaagacccatggggaatggggtttaagcacgggttcaaaattcaacgctcgggacggagtaaaaggaagggattcgaagagtatcataattctaggagttgctccacatggcgatataaaatcacaagaaaaggaaaaaatatacaaatcaaaagaacgtattcaaaatgtcgtttcagatccatcaatcatataaacatccccgcaaccccaaccgccagcccaaagaccagatcatggagactcgacatccgcacaggagaggcatcattcccattcgcctccgcactagcagtctgcgtggcaacgctgctacaataccccaaattgataccatggcaagcctccaaactcaagctcgagcaaatagaagtcgcctgcgacgaagccgtgacagcctcaaccgtcacacctcccccagcgccgtcaatagtaacaccgtagcgacccatcagcgcgccagtgcattgtgtgtactccgactgacacacagagtagtaagatgagcaactctcagcatttccaaaagaagtcgggacgacgacaaatggatacgcggcgtctagcgttgagccggttgcggacgtctcgccctcggtagtggtggttgcggttgcaccgctggggaacatgaacgcggtgcctgtgcctgtcgtcgttgttcctgttagactgccggtgcagcttgcaccgctcgcgcagcaggcgatgttgttggcggcatcgcgggagcagttcgttccctgcttacagcatgcgtcgccgttacccagatcggtgcaggggttgtagccgctcggacaattgttgtcggctcgtctaaggatgcggaggacttcgaatgcccgtttgttggctatggctgcttctgcggcggtgaagggtgctgtttttgtcgagtggacggtcgaggcgaggaatgtggcggcaatccagatccacctggaagtccgcattctcgggatctagggcggggttggaatagtcggtttggggaatggcctcgagattttggttgaattgggtgagtttaatggtttattctcatgcttcgtttcgtcgttggggtcgttatccggggttgggctgggtgtcaacaaactactcgaaagagtaagattagctttcaccggtcgcgatggtgtaattgaggactcgagacttgaaaatacctgggtacttgctgtctgaagggagattcgagggattctagaaaagatcggagttagagcacaaatgatgtagttcgcaggtcgccaggtcacaaatctccactgggatgccccagcaaccgcagcccgacactctagatcggaagcccaagcttagattaatttttaggttaatttctattgacgagggcactggtagtaataggtagtagaataattttaataactactaaaatataatctgtgaaacaaaacgtggacacaattcggcactcgactacggagcacgaagtattgaatatacagcagctgaatggctgattgggcatctgaatattcaacaaatgagtcgggcatggatgttaccagtcaggagcaatccagtaattcttcgcactatctatatggaattgatcaattgttccctctacgccgtctcttccaaccgtccaaacaccactttctaccagttctctccaccggtctatcagcctctccaatctttgagcccgtctttcaccaccaaacggatggaaaataccatgttgaaagagttgtgtgacagaccctggcgaaattgatgtcccatcactcattctcgctccgtcgtgatcccagaaaggtagcagtagacggaagcccgcctcctcgcaatcgtattggcaccgccgcaccgactcactatatagccccgttggaataagatcattctcgtcgaatggtatctcatctccgggcgcaaagaaaagccatcgaatctcctccccgaaaccgactgtgtggctgctatctgcagctgcgaagattaggacgggcgggatattgttgccccattcctcctgttcgcgaggtacccccgtaaacctctgccgagccgtgaaagccatggtgtcgtgcggaacctccaagccgggcgcaatggctctaaaacggggagttctcattctcgtcagaaccgaacgaatgaagcactcctccggtatagacgccgcatcaagctctacgtctgtgaaaagtggcgcatctctggagacaggcaaaagcgatccagagggcattctggcttcgatagccgccgagtaccgatctatagcagccacagtactgtcaacctgactaggacaatatggaagccaagaccaaagcccgatttgcgaccgggaatttgccagttctttgggcgcttcgccctctggtgaatcggtcgtgattttaccgatccgaagcatataaatccagtgggtaaggatcgtttctagtgggaaccacatatcctcatgctcgccgatcggctccacactatccagattttcgagggtcattgggaaagcagcacggtgcagctgctggtcatagacgaccccgacacaatgcgagcctaactcaagcacagtgccataaataataacgaatcgttccagatcgtctaagtcgttgtcctcacccagaaaaatattgtcgaccaactgcattgagatatcatttatccagtaaaagaagcctggctcaggcgagaatatcgaatccaggaaggaattcactgaggggtggagtcgttcgcgaacagcctgtgtatcttcgtctgcgaaaatgaagggttgactagctaacacatcgagattgggcgtctcttgtccgtggcgggccatccatccatacgcaaccaaatagttgtgtagcctcgcacagcgctcataatcgaggggaccattgagacgtgcagggttggcctccgacaccagggcatcctcaatgttgagaatttgctgtggcgttgtattcatggtgaattcatggtatgcttaggggcgcattgaaaacggggctcaattctgccgattttgcaggtttatcaacgccaataccgtaatttatgcaaaaaccggggtttctgggccccagtcacatgacatgcctatttcgaccaggttgtcaagttgctgcatgtcttaagaggtggtgtatcgccggacagatcgatccgacgaccgatctattcgtgggggcatggaacaacgcagtggggaaattgactctttattttgcattgtttagtgcttttccagccacttgtacacccggtctgcgatctcaaggttgttcttctccatgaagaacatgtgtccgttgccatgaataccctctttgcctagatctgcgtactcaacgtccactccagcttgctccagatacttgacggtgcagtaatcgtatggcgcgtggaacgatgcttcgcctgtaacaacaagttctgggattttgcccaggttcgtcaactgcctcgctggggatttctgcatgatgcattggtcgtgatcagcgtcgattgctggctcgatggttgtctcaatattttcggcattctcgcctgcagacggttcgtatccgattgcgaggtcagtgagaccgaaagcgaaagctgggtcatttccaaacggcgggcggagcgtgaacggcggaccagacggctcgagttggacaatacctttgactaggtctgggcgcatgtctccgaccctccagcctattcaatcgttaaccacctcagcgagtcatagtgcttggctgaaatcaccatatgcacccgcctgcgaatgactgatgatataacagtcaccgacgaggtcgactagagctgaatacgcctgcgcattttgttcctcgcttatgaagcggtcggtctggaattgcatctggctcctgtagaaagcgtcgaaagttgagtcgccaatgcgaccggtgccaggccattgcgtgtgaagcttcgcctgtggccattggttgtcgttgtttgctacgtcggtgaaaatatcagagaccgaatcgggggagccgatgtacccaatacttccctgtccgggtgaccagaaggagcgaccgcgtgcgggctgatctgagaggtagactgtgtgacccttggagatgaaataggatgcccatcctggccgtccgtctggagtatcaagaaaattggtgccggtctgagccgcgcctgcaatgaaaataatgggaagtggtgggttcaccggggctgactgaggggagagcttctcgacgtaaatttgccctatcataaccattgatgtagaattggttgcattttcctgtttgacgacttagatacgcgtcgaattggtgggaatcaagacttgctgtgatgttcgtgtatcgtccgccaacgtagagaacctcgcgcctaggaacaatgtccctaagctgggagccatgagcttgcacattgcctcctagagaagcgaaagcgacatgcgtcaaatatgtgagggaagccaaggtgcgaaagctcaacatattaacccaatctgcgaaaagtgaaaagagctccagctcgaatatgtagtggatccgtgtacgaaagggtattcagggtccaaaccccagggtgacaaccccaggttttggggtattttgatgcctgaatttccacacctgccttagtaatcaatgtacaccgcccggctctgctagcatggcataaatgaagcttttgatcccatacaacatacgaatccaagttcgggtttttgccctctagaaatatatatattgtgctaataaggctcattgatgattatcgacaaaataaggctaaactaaaaatatcgttgagatacaaatgcatttatcatgtggtttgcggtgacccggtcgcttgtgaaatacattaatgtaccacaaggtgagtccgctaggtgtagaacctctcaggcattgagggtgtcgaccggctccggctgtcgcgaccggaagcgcttgaccagattgctcgtgttcagcgcaaccagcttgctcgtcggcatcaagaacaactcgtcgatctcctccagcgtcttgtccttggtctcgggcatgaagaacagctggtagaagaagcctaacgcggccaacccgccgaagaaaccgatcgtcaggccggtgtaggtcatcgcctcctgcattccctcgaagttgtatgtcacgatgaatgaccataggtaaaggaatgtcgagcagattgccatgccctgactacgggtgttgaaatcaaagctctccgctgggacgacccaggtcagacacgaatacgcgccgaagaagcccatgtatatcacgaggccggagaagaacaagcccaaggcagttgctctgtgctcattgaagtaatcgacgccgttatttgtgtagaggtagccgacacccaccagcaccagaccgacgatgaacatgaggatgttttgtgcccacacgcgtcgtccgaatctgtccatggtgaacacggcaggaaccgttccaaagaacagcgcacctccgccgaccatcgacatcagcactgactcgcggtcactgaaattcatcttggccatcaagtttgacatgttgtacatcactgcattgatacccgtcatctgtccgaagaagatcattgccgtggcatagacaagcgcccgtctgttgcgcggctgcgtgcacacttgcatgtatctattgtaccatgcctcgctggtggtcgcgtcgacatcatgcttgactgtgatttccatcgcaatgaactcgtccaagcttttggggtcggccatatcgtgcagcgacttccacacctgccacgcacggccagtcttgttcttggataccagccaacgcggtgattcaggcaggaagcacattccgaccaagaggattgtcgaaaacaagagagacgagcccagcatccagcgccagctgcctgaccgcacgtcgaagaacacacctccggccgcgtatccaatgatctctccgaaggcgatcatcagctggtacacagacaccaggttgccacgcacctcaggtggcacacactcggagatgtagatgccgacacagccgccttcaattccgataccgatgcccagaatgaatcggcccgcaaacagcattccaacgctgcggcagccggcacaaagtcctcctcccagtgtgtaccacaaacacgagatgataatcgagttacggcgtccaaaatagtaattcagcggcgtcatcatgaccgcgccggccatagcgcctagcggcatcagcgaggaaatcagcgaaatgtcggttgccagtttcgggtcctcgaggctcgtccaatcgcctgaggcgatgaagtgcttgcggatgccaggcagcgcgccggaaataaccgactggtccaaaccactcagcatgccgctaaaggcggcgaagacacccagcgtaaggactagcatgcgaggactcttcatgtacactggtatttgtgcgaacgctatccggtcatacagtgattcgctgccgagatactgctaggcctgttgatcgcgtgcctcgatctcgtgctcacgctcctcgggcgtgaattcatcgctgaactctttgcccacggtgtcgggcttttcctcatatttgtcgtgcatttcgtgtggatcgtatcagtcatgcaacaaaaattaacttgtatgggatcagaagagaaagagaagagaaaccgacgagacggcccgaatgccgctctatataagggcgtatttcgccgaaaagcctttctgcgggatgctgtacttctcctcaatttccccgacattcggcctggaccccacaattcgccagtgcacccaatgagttccttgcttttctttctcgtaaaagttagtagcatgtgtatcaactagtattgttgtggggtttaaatacagggaatgttgcgtgtcaggtccaacatttccgatcgctaccccagcatccccacgatagcaattcgtctaacgactatcaagcccaacccagaccatcagagaagaagtgttcgattataacgagagtggaagactgggagctacgacctttcgaaaggccactaaatttcaggtcagtcaaaaaaaaatatagaccctgtccttctcatgacattttttggtaagaccggaatggtcggaacaccacgaggatgtttggctcgatcaagtaatagatgagcaacgcctcaaaactctgagacaactcaataaaaaacctccctcgccccggtcgggatgacctcggcacgggtgaagttcacggacttgtacggtgttgtacctaacaactgccgattcggacggttcggctagaccggggttggctggggcccctcttgtgcggaatacggagtagtagtttacggagtacggggtactccgtaaagcacatgatacagccaaacccgatcggcgccgagaaaagttcgcaaagccggggcgctatacctaattaggaaatcattgcgctcctctctatggtggaataaaccgggaccatgcatttctccaaagtgaccggggtttacaagaaagtggggtacatttcaacgaggtctgactgtacacttgtattattctggaattctatgtgtcatgacccggtatttatgccctgaaacgaagtgagagaactggaactaatcgtgtacatgtgcacgagacgttgcaaaaaagacatggcttgactatcgaatacttggactgagacctgttccatattttgcacggagtggctatgctttcgagagtcttcttcacttgaatttgcttggcattcaaggggcgcaaccgttcaaggttgcgatcattggctggaaggtctctaatccggatgtggcttgcgaaatgagcagattgaaaatgctgatcaacaatggcagccgcctctgacctcattgtctgtggttcctcgcttgcgttggtctagaagtggatattgccaacctatgtgctcattcatggtggtgtacattgatgtctgtcagctgtctaatcagaaatttcctagttaatgagttccctcgagtgtggcctgggggtcatgttgtgctaacttaagtttctcctgagaggttaccaatcacacattatgttgcccctcgaacaaactaggctaggtcgcccgttgcccaggaatagcttggtgaccgggaagcatatcgatcctcgaacccttttaagaggtcaccacatatgttagactgaccattacacgtacaatcaaactaaatcggttattgattcaagtataatcaaacggttcgtagctcatgcacatgtcagtgttgaccgacgaactaaacatgtgtggtgatagaactggatggcacctggtgagaatctatttactctaggccttctgtatttactctgaacaactgaccaggcgtttaatagacattattggtaatacagcacggaattctccaccgaaatctatcacacatcacatgcatttcttaatatactggggacgccgctgacgcacgcagttgtagcgccccagaacggctgccggtgctggcggccagctggcagaaaagggggagttgtatccggtaccaagaaggaaaagtcatctctatcgtgaatagtatcactctggcaaactccgccacatcctcgacatacatggccgctttcggtcagcttttgaggggaagtttctcttctagaacaatcgcaagtacctatagaacgccagtcacctatacggagtaatccatgccgaaatcgatactcaatcggcatctcacattgccggatctccacttagatatatttacgaagcttatgtccaacctcggtcttataaatcggataccaccacttctagaacaagtcgagcgagcttttagttctcactcctagggttcaacgtctatcctttccacgccgttagtcccaccgctaagagaagagtcttaggaagcgaactgtctcctctatatcagagagtcaggacgaacattccacagggccgccctttatgccattatagaacctagaacaatcagcgaacctagtaatggaagcgggatgttacaatgatgtctcacctatcctaaattcttacgtctcatatatctcttgagttttcgggctagcgtttctatcagagcgggggggtatatattacccaacgccactatgtctaacagcaacgtatgactttgaagtaatcttgcttcactagttacatttcatcggttcattatacatgctggtccttcgtagtagccatcgccatctactgactggggcatataatcaacaacgtcccaccgacctagtgctggtctataatcaaatgaccgaaattgacaggaagttccccgccctcactcgatggccttgcagcatagacaccaacccataggtcctttatattttcctcttcaaaaacccaagtgacctcccggataggagacttttccaagccctcaacagaatagatccacagacttccatcctcttttttaactagttcaagagttgccgtaccactacccatggccccgggcactggaagcaagctccagtccgcccaattgtctttcgcaacgacgctaaggtggggtttaccgtgggtgaattcaataccgcacttcacccacttctgccccccatcggcgctatttaggacaaggaccacaccgccctggtcatatttcttctcccaaacggcattgacagcgacgcggatccgcttgaatgacatgagaggtatagatttgtataagataggggccgagaaggagatggtggaaggcggtttagcccatatatccgtggaagatggtgctttgatagtaaattctaggggaggagaaccgttgcctggaacttcggcgtccgagttggcgaatttgaattgggattgcgacatggtgggccgtggaatgcgacgaagcagttgtataatcaaccactgatatttgaacaatggtacaagtgaaagattgaagatttgaggaagtcagcacagagagtcagcggaaagataaatgactttgtcctggtgcgagcagaagagacacgatgggaagggctcgaactggcctgggggatgaggtatatcttgtataaggtctcacatcagcctgagaactattaggaagactgttatccaaccaatgatgtttaaacctatctctttcactgcgtttaacaacaaaataaatgaataaattagtttaccatagatggatgatgcttttggtgcgcatcgcgtatcaaccagactccgaatcctaatagataagccgcctgagatctcaattttcataggccctaaggttccacgagcccaccttccatattaggcaattccacattggtaatagttacaaggaggaccagaggcatacaccaaggcaagtgccgaaacattcaatttgggtaatttgatgagaacggaatacgagatgaaaaaagaaagcctattgtggaaagagggactccattttagaggcgtgctaggtgaaaaccaattgttttaaatgcctttctgtcactacagtcactcttatagaaaagccatactggtttcaattcagagttagagcaactcggtcttcactgtcttcacaagaagcaattttaggacaaagaacattcgcaatgcctgagaaaactgtagtcgtcattgggtgagctttttccttgtccggaaatatttgagagagcacaaatctgacatatttgcaatattatagtgccggggtagctgggctcacaaccgcgctgctgctgtccaagtgcccaggctataaaatcattgtcgccgcaaagcacatgcccggagactacgacatcgagtacgcctcaccatgggctggagccaactacatgccgtaagtaggaataattggccacggacaagaccgtaattgacaagatttagtgtctcgattcgcgggacagaagctgcggaatgggagaaagcgacatgggcaccgctcgaagacctcgcgaggaaccatcctgaagcgggtgttcacttccaaggcaagttgaaggcttgattttagtcagttagcagtggcatcgactaatttgattaaagaatgtgagattcatcgtcgcgaaaaagatgccggctcggcaacggcggattggtttgctgagctcctatctccagagccttggttcaaagacactgtgccagatgtaaggaaacacttcttcacctaatatcatgttttcatatttaccagtttgattatttagttccgtccgcttccaaagtcatcgctcggccccggtgtcgatgcaggaacggtcttcacgtcggtctgcataaacacggcgatatatctaccatggctcgtgtcccagtgtcttaagaatggtgttactttcaagcgcgctgtgtttagtcacattttggaagccgcggggccgagcgtctgccccgggaaggtcgatttcgtcgtcaactgcactggtctcatggcatcgaagctcggcggcgtgaatgacaagactgtcattgcggctcgtggccagattgtggtggtacgcaacgaggctggaaagatggtcgatgtttcgggaaccgacgacggcgatggcgaggcatgctatgtgatgacaagggcggctggcggagggaccatcctaggcggttgctatcagaaaggaaactgggactcccaggtagatccaaacctcgctatcaggatcatgaagcgggctgtggagctgtgtcctgcgctcaccggcggccggggaatcgagcacctggacattgtccgacatggcgttgggctacgaccagtgagagaaggtggggtgaggattgaaagggagcgagtaggcgatctatggctggttcataactacggcgccggtggagccggataccaatcgtcgtacggatgcgcgcaagctgccataagactcatccaagacgccgcggggccacagtccagattgtaaaattagccagtaagaccaagcaagccactagttagagttagcatagctccactaatagctaagaaatcagtcgtctcgccacattagcgggggagttgattggaaacccccagttactatctttcttccttatcagtcacctccgtacaacatacgtcctctcgtgattatatgtttccttccttgtaaactaatttcaaccacacggcatgggtccatctgggaatcgcactaattctctcgcattcgccaagaacgattgccacacttgtgcggctcttaaagaaggctgcgaccgtcagcgccctcggtgcggcacatgtatatcaaacaggagagcatgcggcggctttgccatggatctcgtttggaaagagctgccagttgttaatcatgggccattgcccagaggccgcgaatctggatgcagctccaagagagatccgcagcacaccttcaagttcacgcaaggtcgcccgaaaagacggcggaaaccgaggcaatcgaatactgtttaccagtcaatattggatctgggtctagatgattccctacgccatgatggggcaaactttttgaatactactggcaaggccagcctatcatttccttcgacacctcaaccatcgagtcctgaggaactgggaatcagcaaagattgcagtagccaatccaatgagtatatgatctatcagctgcaaaatgagacgcatctgtctccaggttgggaaatgggattaggaactatggaatatgttgatggaaatccgattgatgcatcctgcccagacacgatagagcaggctcagcttcctacccaacttactctggacccagaccaagaaacttcgccgggcattattggcaatctaaatcaagcgggcggtgacctcgctgaagagctgtttcctatgacaaatcttgaaagtttatcgaattgggccacagaacaagataccgataatcccgtgctcgaggaagatatgcaacccatatatccaataaaatatcgcaacctagctcacaagtatgagccaattctcgctatatgtacgtatacacacttgcagattccttgcaacgtccttcccactaaatatttacagacgacgagaaattctgcgtcatgccgctcaccagggattgtcgtatcaaccccttcagagctcagactggaagtctcgaaaactacgactttcttctgcatgcgattgtagccctttctttccatcacctctcgaagatgaacaacaccgatgatttgatactcgaaatgcaccatcaccgatctactgctcttcatctcttcagccacgccttaagccagccgacttccctgccacttcttgataccctcctgatactcgtcagtatagaggtatattttgccctataatcatttgctggaatataatctgacatatcctcaaggtctgccagtccgcgttcggtgcgtggggagtacatctgaatggcgctcaaaaacttatcacggaacggaaggatatggaaagaggtttctgtgattctcgcatgcgtgcgcagctggcgatgctcatatggtatgtctagacgtcttgctcaccctgaccatcgttctctgttccgtctgacacctcggcaggtgggacacgacaattgcgctcatgtctcgaaccgagcctcgtttgccgttctccttgttggagagactgagagggttcgatgacagcgatggatggtcctgcttcggcctaaacgggtgtccgtttgaactgatctccatcatggcgcgccttgcaaagctggcatgcatatatcaaaggaccatccagatggaatggaccatttttaacttccgccccgtcagaaccataatcgctgaggtaaaagggtatgtcaacaaagagaaagtcgaatgggacgaattgaacgacctttccgaagacttcaatttgcgacgcaatcggtactactgcatcgaagcatggaggcatgccatattgctctacatctatcgtgtcttcacgaagaagcccgacgatcgagaactccgcatgattgattacttttctcgtgttatacttgactgcgtacggtgcatgccgtgctcagacaccacccagaagcaggttctcttacctgtgtttctagccgccgcagaagttggcgacgaaaacacccgttctatggttcgcgagtattgcaatcactggagagatgtatctcgaatatatcatttcgaaacggcgtcttctctgttggacagcatatggaaggactgggatccttcgacgagaagttcatactggtggggactcaaggttggcccgcaagattggatgacgggagatgttaaaggtcaatctttggtgtttgagttgctcttaggatgatcataggatttttagtgtatagctctttaacgacaagattctagtttctcattccaatttgatgtagcagaaatatctcctttttgtcacattcacagatagaaacatattcttaggctgatcgctacaatttccattatcttagcagatatacgaggattcttctcctcgttccttccaaattgtacttgacgtacaacaggaacattgcattggtgtgggcaatgacttgcctgaaacagagcgagagccgtcccggagtacgtcccggagatcggttcatgagcggaaatactataatccgctccaatataccgacagacttccctcccatgtctatcgtcttgaattgagtactctttccaaagacctagctcgcatcagacaaaaactgctcagagtatatcatatataaatcaagtgatttcgtgaagcttctctaggtttatatctgcatcatgacatgcaaaacatattggcggagagtaagacccaaatcaactattcaacttattgtggatcattggactatagagaggttataagtattttcgatctctaatgtacaatataggaaaacaagttggctgtgggtaaaacatgaaaatcatagtcagccaacagatcataagcacggatttagtccctttctagcttcacttcgcccttatatgccccgatatccttttctttcacgccatcattgtctaccaagataccttcgatagcttcttctctcctagcgttgagcataccgaagtcgacccttggtcctttgaaaatccccttcttggtggtatgccatagcacaatcacaaagcaaacaagtccagtacaaacgactgacacataactcatattctcgggggtcacaggtatctcagtggggaaacagtagatgatatcgaggaacaccacccacaagactgaaatcgcattgatagtagacccgtactggccgagatcaaaatagcgtgctggaaggacccgatagcggccgcgccatagcaaaacagcctgaggaaggacgcaggacgtttgaagaaacacgacggctgcgttgaccatagccgagaacgcagtggaggatccaaggaagatgagtccatatagctattgaagttgttaactgagagtgaacaaaaagggttgagaaatgtatcataccgaaacgaataccgcagataatagaagagcatggatgggaacttgcattccaggatgtacacgttgccaatacccagagtaaggcagcgctccatcacgggaaacggcccatattgtgcgtgatgccgtagtagctgcaaaaatatcgtcagacaaacttcaaataacttttcacaaccacataccattggccaccaagttactaaagaaaagaaaggcgaagaaagccatgagaatcgaagctgccactcgagagcccgttccgttgtagtagatgtcaaacaggggaaggccggtcacagtgtggagtactgcatcaatatcaggggttgcgtatagcagagccgcagcgaagggtaaagttgtaacaaagcctgctaggagcgggtagatcatgaccttgggcacattcttagacgggttaggaatctcctcgcacatgtgagcaccacaatcgctacccagataggcgaaaaccgagtttgccacggcgagcatgaaggcaaatccatcggaagaccagcccgtccggttcgtggtatcggtaaagattgcagagccagaggcgtggtccttcgtgacgacgaacaacacaatcgtcgtggaggtcagtgtcagcacggccaagacaaacatcagcttgttataaagaggaatccagtttgccatcaggatattgatcgccgccgccaaccagatcagacagacataaatcagatacgcgtgccattgctttgggtcatagtccggataccaggcgacggtaatatcgagaaccatggaggcgacgaaattggcgacagatccagaagagagccaccaaccgatgacactcatccagccgtttctgaacaaaaaaaaaagattagcaagatagattttaacaggcagttcgaggaggagatgcaattacacaaatgaagcgaagggtctatagtcttctcgtgcaaccataaaagaccagtagtactgggcacctgcaactgggtatgcagacgctagctcggccattccgattgaaactatcgttgtcatgaccccagcaattgggagagcccagatagtaccgcctgaagaagcctctgtcaaaccgataccaatcgctgaaccagtgcctagccacgtgcatgtcagggtaaaagacaaggctcctagagaccatttggagaaccggcgaggcatagcggcctcatagccagcggcctcgagctcgagatcatcaatgttcgtcatagttcagaagcgtccaaagaatgtagaaaaataactgatcgaaaggatattgtaaggaaagaagcttcgtttttaactcttagctacctgtgtagatagttatcagccgttaccgtggtgcttgatgtctcttcgcaagagggagataagagagcattctaggcatctgagaaatgcctctttccattcttagaaggagatattgtacttgatcctagatcaattccatactgtgatttgattatctttgccttcatgtcttatcgtggctgacaatacgaatgatcgaagggtgcccagaagcggaagtacccaattaggcaagcgggcttgtctgcgttcccgctcggctttgtggcgaatcccgaatctcggttctgcctcctgcggtcgaatcacatcccacgcagacgacccatcctattctgccgatttaggaaatcgaggcccgtcatgtcgtcggagataagcgctgtcgatcgccaggattagcaaaatggcttccccagaacaatattatactgctttaggaaggagaggagatcagcagttgggcctcggcatcagaaccccctcgcagccattaaagcctatttaaaggtgtacctgtgtgacggttgataacaccatcttctatcacaagctctcttcttcttttctcaactccgtgtggttgtcttttaccctctattctccaaaatgacttcgatgaatgaaatcttcggcgcctacgctgcacgaaaagctgtgcttgaagccagcagtaatccctttgccaagggtatcgcctgggttgaaggagagctcgttcctttccatcaggctcgcattcctatgatggaccagggatttctgcatggcgatctcacctatgacgtgccatcaatctgggatgggcgtttcttccgtctcgacgatcatatttctcggctggatgctagttgcggcaagatgcgaatgcagcttccgctgccaagggaggaaataaagcgcatccttggacaaatggccaccacgagcggaatcaaagacgcttttgtcgagctgatcgtcactcggggcctcgttggcgttcgtggctctacgcccgaacagctcacccagcagaatctctatatgttcgtcctgccatactcctgggttatggagccagagatgcaatatagaggtggtagcgccatcattgctcgcactgttcggaggacccccgttggctgtttcgacccaaccatcaagaatctgcaatggggcgacctgactcgcggaatgtttgaagcctcggaccgcggcgctacataccctttcctcaccgatggagatgcaaatctcacggaaggctctggattcaacatcgttctcatcaagaacggcgttctctacacacccgagcgtggagtcctcgagggcgtgacccgcaagagtgtcttcgatgcggcacgcgctaatggcattgagttccgtgtagaaatcgtgccggttgagtcgatatatcactgcgatgagcttttcatgtgcaccactgctggtggtattatgccaatcaccgtgctagatggaaagcctgtgaacaatggccaggttggtcccatcaccaagtgcatctgggatcattactgggcgatgcattatgattcgacctacagctatgctcttaactacgataactccgagaagccatcagacgctgggcgccagcagagactttaaatcaagccttgcaattggtcaaatgtacttaggaaaatcagttagcctatatgaaacttgtgcggctgcatccttatcttgttacaagagtagtagtaaatctcttttctcgtctaaccattgtgtcaacgctcttccaaataggcacgtattgtctaaatctccgagtctcgcgtcgaccttgaacgtccacatactgctcttcaaaaacatcgtaggaatctggaaatctagtaatatgttaccacggccgacctgaaattcacagacagcgcgaatagtgaggtacgctatatcattgaaggacgtagtttttgacggcaatataacggctttttcgtcgtcgcaactaccatccgagtagacgataaagctgctcacagagagggtcgcattgacgaagccctcgtcaatatatattcaacccaagccacaatctctgaaatagcgttgaactctcgcttatctactttgggacattgcaaatacgagcagcgagcaactagttaatcacatttttactactataaacaccctttaatcatcgtacaaaagtgactagattgcccaataaatccatctcacgaggaaggctgcccaatttagcaaagccgaatccttcaatcaaatctttctcccaaccacgacataaacatcgaagcaataatagcaacctaggcggtgcaagtcacttagcatagcctccctcagacttacaatctgatccatggattgtatttcattcaacttgtgcattttgaaagcagcagtcagaacatgctggattccgacaacgaccgtgagattgaggtcttcccgcgtggccgggttgtcaagagtgtagatccgctcttcacaggattccagtccagatttctggaaagtgccacgaagggtagcaatactaaagggagttagcctctctatttagtccctggtagtcaggcttactttggtgttttcccaagcgaaacaagagtcctaaggaataagtcggttccatatcgtgcatcagtggctcgcttcccctcgggctctcctttgattgcacactcatgtgcggcacaatctatccactgtaaataacctcctggctctgctcggtattacgttagatcttggattaatcgaagctaagatgggaaactccgtactgagaagcgtcatcaagtttcgcacggcaggctcccactcgtcagaagacaatgccaccaccatcactcgaacattgacgacatcgtattctcctagatactcatctgggaatggctcaagaaaattttgatgatggaaggtgatattttccggcaaggcatccttgtggggaaacatgacgtctgagaggtcaaacccgtcaagctgacaagtacttgggagggcagctgcgagctcacgtaaccagatccttggagaatagtgttagggctttcttctcttaatggagttgttactcacccagttcctgtaccgacatctgcaatgcgcatacgatcatgttgtttgatggctggatgaaggagatacccaatattggcttgccaggctttatattgcatattcagtctgtattccatgttaatattaccagagggttgaattgctgctgagttttccacctgtcgcgttcggctatgttcctaaccagtaaatattcaccgtgagattggacttggtcggacatttccaaatgtcgaaagcgatatgatcttcaaaaggttgaatcagattaaatccgagcaaagttccagcagtataagctcttttataatggcgagatttagctttgaagggcggatttgggggcttggtggcggtagtaagcataaatgttagtcaggcctccgatccaggcctcccatctaggcctcccatttcggccccatgcaggattctattaagttatagacctcgaacggtctctgtctctgcaacagccaactagctgagagtatgttcagtcagcggtggtagatctcgtattttttggagtacttatatgacccatcaaaccaacggcacctctctagggcccgagcgattgagctgagtggttggggctataacttgaactcacatgtgcggaggtgatagacgtcatcctggtcatcaattgccattttcaccataaagttcacgactcggtgtgtattatcaattctagcgcccaatcgcgatgagggagcagcaatgcccaccccggaggtgtatggggtgcaccttactccactactaattactgtatgtcaatgtagcagggccttgggggttgatattattactactattgctgtgtgcctcaaatttatacccaagcataaaaagtggaggtctgtgaatagtcgcgccgcgaagccgaggcctatatgatcttctgatatcctgtaaatatcacaaaatgaggacttatatgcagttgtggtgactagtatcaatcattgactcgccctttcgattcgaaaataatcattgggcacttcccctcgattcgtctagacgctattgtgctcgttccagctttgtttgccccatcctctttgcctgtcttcttgtaaaaaactaaccttacggaatattattcaatgcattcaagacactttagtgtacttctcatctatctctttcgatcaagactccatacctaaccttggcgccgatcactccacctgactaagagccgatcttggcgcgccgaaatggatcaaagtcgcgtccctcaacaggacgccgaccgcgtggccaccatgtacggcgaactcggcaacaaattggtacgtgggctatagattcatcccgctcttgggcatttatcatctcaacacagaccgaccgtataatatcaaaacaagagaaaacgaaacccgctgaccaacaactcacgcgcaataggtccaacacgccaaacgcacccaatccctcgcccacctacccccataccaaaccgaaatcgtgcgcgcagtaacccgggaagtccgcgatctcgaccgcgatgtcatccgtctcctagcacccttcgagggcgcgttcaacccctcagccgacccagccatcgcctgcgcgctcctcgtcgaccacctgtgcatgcgccggaacaagcgctgcctgcttgcgtatcaccgcgtgcgcacagacaagctcgaggagctttgctggacgggcgtggatatcctcgagcagcagcagccgtccgatgacagcgcggcgccgcagcacacggctctcggggcgaacgggcatagctcgctgagtcccgaggaggaggagtatttccgccagtacggggatatgcttgctgcgtataagggccagtggacggatgttgatttgacggggacgctggagccgccgaagcatttgtttattgatgtgcgggtgttgaaggatgctggtgagattcagacggaatatgggtatgtttcttttcttttgtctcctgcattttctgggtgttcggtggctaatttgggtttagggtgatcaacttgaccaagaacagtcagctgtatgttcgtcaaggtgatgtggagcgtctgattgcgcagggtttcctggagcggttgacttgaatgtgagccggaactacctggctgcttcgggttttatatgagtacaagaattacatgagcaaaagaaatatgagttagcgttggatatctacagtggttttatgacgggaccatggactttgagatacccccgccgttaagacatcggccaaaatgaagattttctgcattgccatagtgcgagtctaattatgtatgaccgttggtttgatcaatagcttttttactcgaattactctctagggctagattggcctatggtaaaagaccaattgaagcgatgaccataactagttatctcgttggctggcgttatgcaaggaaacaaggctgcggctgcatgtcaatgccgatcatgcggcgcatagcactgtgttccgaccacggagctgtagcatgttgtatactatttctattacgtatgattatcgaaggtctagttagtctagagttagcgcaattgaagagacaacctattatatctctcgaagacccgttcccctccgctctcattaatacggtgaaatgctacggcgtactccgtagaaatacccattagtagtaccatttagcccacgatcgacccgaccgcacttcccctctatgcttaatagaatagatcaatctagtcgaccccactaatttaaacctctatcttagcctgtaatgcatggaactagtagtcattgtaggccgatgtactccgtgatagattaattaatcaagccttgcaacctagaaaactaggcacctcaaaaagtgggggtttgaattggtaacctggggtgtcaaccaaagggttgacattgtagtctttttagtagaacgttggtaggttcttcctgattgatctaaaagaaaatgggtaagtaagagaatggtgaaagagctatagcaactgagaggtaactgagagcaaactctctatcctaggccttaccctaatttagtcagtcccatcatttactctcactgacgagttctaatcctatacatcgcaccgtccttcttctctcactcaccatgccgaatgtcctcacttccatttctgtctcgacgggctcatccatgagtacaacttcagtgatacagtttgacaacctgtctgcctttaaagctcacgtcctctcctccctacaccaagtcgaaagctatcacgactttttatttaccgacgtgcctgaatcctgggggggcggccgtgttccagcgtattgacgaaaagatcccttctcggtaagtcaaagaccttctgcatctaattttccttgactcttacccaatatactaggaaaacccacaatacaagggaccgtactctacgggtcaaagtcataccgacagaggtacaaaattgtatccagcactggctagtgcagcagatgatcgactggctcttgaatcataacataacgcaatatgaacaaccactcttacgtgtggcagttggaacaagtaagtaccttacaactcacttacctgcacaggaactctagaaaagaacccaacttctttttccgagtcgaggttcatatcatgccagctattgcggtagagtgtggctggagcgagtcgattacacgactttataataatatgaacctgttactaatgggtggtgatggctctattagggttgtcattatcgtcaagtggagaaagctgcaaggaggtgtctcggggactgtcgagctctttaacagagaccgaaacgatatgcccagatgtgaacaaagcgaagtatgtccggatttctgattaaatatcacatacttattacctggaatctgtgcagactatcttcccccgccctgccactggaaataatcaacggctagggattcgacgacgtgatatctttgggccggcgctattagatgacaacagcgggaatgatatcctctacctggatgtcgagcgactgcgtggttatgccgccgaatcccttcacttcatgaaccttgttccggcataaatatcttcttggttgattgtatgcaactaattgattcctttgtcttgatacattgctgctactatgactactctctctatagtaactgtaaggcgatttactacaacaatacatgtagctactattgagagcataggtgaaacttgagagaccctaatatatcatgtgatgatatcttatcttatcttatccgcttaggtcagccgagtgttggctgtttgcgcacgggcctaccgcctcccactatcttcatctgtattagtccggatccggtttagcgcgcctattaagagataagggacgtttagtcaaaaaaccttggaactccgatacttcggatcttttctatctggtctgttgctaattcagatttgtgttgataggtaacttcctttcacttctatataattcactgagccccccttgcaatgttcatctcggttgcgtcatctgtttgtccaaacggcccaatgcgttaagtggccccgtttaacttccgaatcctaaattttcgacgcacttggttggacagcaattgcgcgagataccatggcggttttgcagcctcgtggccgtcgcgactctcgtgcatcagcgctatcacgcaatctgatgtttgaccgcgacatccagggtaacgccccatcagaaacgttggtggaacatgcaaatccaggtagcccgcccggtccaatgggagcggaatcatccagctacaatggatcaacgacaagaacaccaaaccgttcattttaccaccggtccttcaatagcaatatgggtgggtcattgtggtgcatacatagtgcacggctagagatacggcgcaatttttactgaccattcgacctatcacagatccggctcattatgcttcaggtggtctccgtgaccagactgcggaactcgctacctatggcctttcgctgaataagaattccctcttgagggacggctccggcttacctcccacccttgatatattccacggcagacgggattctgcaagttactcccaggacgaagctgcaaactctcaatccgcagcgggggaggcgttattggagccagggtatccctcagttgaccctgcttcggcttcaggcccttcggccttgacagagatgattcgccgtcctttgacggatacggaggaggaccaggccacacaacccgggaccgatgatatctccttccccccaccgatgatctatgcggaacccgaacgagacaatgaaagcacctcgttattatctaaatcacgatccaaatctatacaaaactatggaagtgcaagtgacgctgagaatcaaagggcggctgcacaacgatctccaaacttaataacgaaaggaatttcatccgtcacccattatactcggatcttgtcgaacccaaaggcatgggatgggcgagccatatggaaagatgctgtggtataccccgcaagtctggttcctgccgtattactgggtctactgctcaacattcttgatgctttatcctatggaatgatcttgttccctctgggagaacccctgttcgctcacctgggaactgacggtatctcgatgttctatgtcagtaccattatatcccaagtggtattctcctgtggaggctcgatcttcaaaggaggaataggaagtgagatgattgaagtagtacccttcttccaccagatggctttcaccatcatgaattcagtcggcaaggacaacccgaaatcagtgattgcaacgaccattctagccttttcggtcagttcggttctcaccggcttggtgttcttcttaatgggtgtatgtgggctgggctcactcattggcttctttccccgtcatattctcatcgggtgcatcggtggtgtgggctactttcttctacagactggaatggaggtttcagcccggctccccgggtctctcgagtacaacctccccacgattcagaaacttttcactctcgatactttccctctttggatgatacccctcttccttgccattggacttcttgttctcaaacgatttgttcgctcgaacttccttgtcggcggatacttcattgccgttgctgcagtgttctacattgtcatcttaagcgctaggatttctatgggcgctctgcgccacaatggatgggtctttgctgccccgtcttcgaacaacccgtggtatcatttctattctctctatggtgagtcaattggttgtaattcttctggcattccatgctaattcattccagatctctcggcggtcaattggactgcctttggtgagacaattccggccatgttcgctttgacattctttggtgtgcttcatgtgcccatcaacgtacctgctctcggcatatccaccggcgaagacaatctcaacgttgacagagagctcatggcacatggcgtgacgaatgcactttcaggattcgcaggaagcattcaggtatgtgaccccatcgctagagctgtggttaatgtgctaacggaagcagaactatcttgtttataccaacagtcttctcttcattgcaagtggcgggtcatctcggttggctggtctgatgttggccgcagccactgcagggattatggtcattggcccagtaataatcggctttattcctattatggtcgttggtgccttgatcttcttgttgggcattgagcttttgcaggaggcattggtggacacatggggaaaactcacccggcttgaatatctaaccgttgtcattatcgttgtcactatgggcgcttgggacttcgtggtcggaatcttcattgggatcattttggcctgtgtgaactttgtggtccaaacgtctcggaaatctgccattcgagcaacattctcgggtgaaatttccgggtcaacggtccgacgtcctcctatccaacaggagttcctacgcgaagctgggcagcagaccctgattatcaagcttggtggatatctcttttttggaaccatcgtgaatgtcgagaacaccatgcgtggcctgatcgaggaggaagctttcgaccgtcgtcccattcgattcatcattctcgattttactcgagtctacggaatcgacttctcggccgcagaagcattcacccgcatcaaccgcgttcttcaaaagcgcaacgtacaaacggccatatccggcttggatgtcgaaagtgacgtaggaaggtccctacaaaatgtaggacttttcgagccagaatctggcgtccctatcttcgaagacctgaactcagcccttgagttctgcgagaacaactacctgaaagtcttctacaaccgccagcaagcactttccacacccaccgattcaactgcaaactccgagctcctccaaatccccgcctcagtccccgtgccctcaggacccaaacctatcaccctaaccgacaacattgtcagctcaccccgccgccagcacctacagcgcgtggcgacctcaaccatccaagcccacgaaacaacaatgatggcctcccccgcctggtccgccatgcgccaaccactcccactcctcctccaaaccttccaaggcctctcaaccgaaaacgaagacttttggttccccgcctgcgcctacttctcctgcgaatgctaccccgccggcgcagtcctgtaccacgaaggcgacgccccgcgcgccttctacctcctcgagtctggcatgctgcgcgctggctacgacctcccacagggccgctacttcgagctcattgtcgctggtagaccgtgcggcgaactgcctttcttcagtgatacacgccgcacggcgacagtcaaggccgagcgcgattgtgtggcttggtgtttaacgggggcgcagtggaaggtgctacaggagaaagagccgcgcattgctcgtgaactgttgacggttagcttgaagttgacgactgagcgcatggatagtatcacctcgtatgttttgacgatggcggcttgattttctttttagttggcttgttcgttgtttgcatctagcttggtggttatctgagcgagttgttgggcctcgtttttaatgttgatattcccatattccccgactctttggtttacatatgcattcgtatatagcagctggagcatgcatgcatatcgacctcgtgatgtttttatgatcgttgtatgtagcagaacttcgccttgcacgcatgtgggtagttgtccttgtataattgaagatacctgattgattgcgacaagcagctgaaacttttctgaaaagccttgggcctattcaatgaatcgaaaaagataatgcaggagatgtatgagttctttgagtttttcacagatgatgtccgaaagaagaagggggggtcaagtatgagaaggcgtctagttctgtgatgcatcatgttaaatttctgtctttcggccgaaaatcagtctcttacaatataatttggggtgtttcctttgttaatgctattcttctttatttcttgctgtagatccaatatctcaattccatcccggcgcgctacggtgcacgtgatccggcgttcctgacacgcgtgggcgcgtccctgattgcctcattctagtttcacacttggatgtgactctcttggagatttttcaatcaacagcccagtctttaatcgcatattttatctacaaatttggctatggcagctgaaaatggagactcaaagctcttcgagcagtgttgcttctgtattgtatgctccaaggatctttcgaacgaatccgcagaacaggtacgtgttttcctgccactaggacagcctgaactagactgacaaaataaactcgtctagctagccactctaatcgagcaaaatggcggcgagcctctgattgtccaacccggtgccgaggtccccgatgtggccaagttcagccatatgatctctacaactattgacttccaagcatacggtactgcctgcgatgcgttgatcccagtggtgaagccacagtgggtgaataactcattgacgaagcggaaactggccaacccccgccaatacagcccagacccgcgtctgttcatgaacgatgtggtggttacctgcggcgacatacccgagggagacaaggatgcaatcatagggggtgtagttgcgaagggtggattgtattctccaagaatttctcaacaggttacacatttggtggacctcacggccgactccgacaaggcgcgcattttgcaggcgaagagattaaacgtgaagattgtactaccacactggtaagtttcatggtacaacagccagtgaccctcgctgactgagaataggtttgacgactgccttaaacttggtcgacgaatcgacgaacgtccatatacacttccagacccagagattttgcgcgcgggtcctgatactccaatccgatggcaagataataaggacttggtcggtgcgtcgacaacaaatccttctaagttgcctacgcctagttcggcgcatcaatcaggccaacgcagtgtctttgaaggaaaatccattatgttgtctccggatcttgcaatcggctcccacttgcaggagtcaatccaagccgtcctcgaacaaggcggtgccaaagtgacatcaaatattgatgtagcagacatgttaatttgtcgttaccgggaaggattttcatatcgcacggcatcgcgactgaacatcgacgttgggaatctcgcatggctctaccacctcatgaccttcaacacatatacttcacccctcagacgactactacactacccggtctctcgcactggaatccctggatttgagggtttgaaaatcagtttgtccaattatgttggcgaagcaagaatttacttggagaatttgatcgcagcagcaggtgcagaatgtaccaaaactttaaagcaagagaacacccatctgatcacggcacacggaatgagtgagaaatgcaatgccgcgaaggaatggggcctcgaagttgtcaaccacttgtggctggaggacagttatgcaaaatggaagctccagccggcatcaaacccgcgctacagccacttccctctgcgaaccaatctcggagaagtcgcaggccagacgccgctcgaccgccatgttttggagcaggtatttttctcgtccgaggagaatattgctcatagcccacggcgcgcaatgcagagcaagaaccaaaatatggtttcggtacagcctcccgctgagaagaaaaggaagattgatgaggatgccccggaaacttcgctcgggactccgcagggtaatgggaagtcacgccgacctattcaaacacccgcacgaactcgagtcatgtccgaaggcaaagaaaatgagacaccatcgtcgaccagtagccgcaagtcaaaagaggcggcagctgcccggcttcatgagtatgtcccggaccttgcgttgtacgaaaaggaaaggaaacgcgtggggggtgttatctacggtggcaggcgaaagtcagatgaaggccgggttcaggagaacaaaaagcgtgcctcacctgaagctgaggatgagagcgatggcgagcaagcagtggagactaaacgacagaaaaagtcacggccaccaattgctatgcacctcttgattactggatatcagagatgggttggtaagggaaacgagaagaaagaagatgcagacaaggttcgtttaacgactgaagttatgaaaatattggcttaggatctatctattgacactttcacagcgagggcttcgagatctcggtatcatggtggtccaagatgcccgacgatgcactcatttggccgcaccgtcgatcttgcgaactaccaaattcgttaatgcactcgcgtatgcgccgatgatccttagcacaaagttcattgacagttgcctaaaggaggagaaactgcttgacccttccgatttccctctagaggataaagaagccgagaagaagtacagttttgacctgtcttctgtcacaaaaaacgcaaagaagaacaagaataaaatgctgcaaggctatcgcatctactgcgtcgaggacattcgaggcggatttgatgccttcaaatctattgttgaaacaaacggaggagagtgcatgctttaccgtggccgtctggctataaagaaccattctcggcgggaggagagcgacgaggaaagcgaatcggaagatggaagccctgtccgcaaggatgtcttcctcctcagcagtactggagctaatcacgctcgagtctggcctcgattccgccaactggcggtcgatatcaagaagactccacggattgtccgggttgactggctcctggacatggccatgtcgcagcagacacgtgctgccgacgaatacgagctgaccgatgagatgatcgagacaatggaccagtagaccgataccaaggtattgagtcgacactctcatccacttagggctttcaacctaagaacatggattctgtgtataagtttggagtatcggcgacgtgattaacatgtcttttggcctgcacataggaagcgctttgtttatgtcacgaatagccacgatttatctcatagagaaatcccagcatctcatcttgagctgttcaaaagaacttgacaccctcctggccctcagcgccaaaaatctgcgccctgcccctcttaaccaggacattcagcgagcgcaacatgacatcagtatccatgccatggaactctgtagacgcgaatcagcacagtccgtagacattatcattcacaaccgaagacacaatctcaccctgcgacattgctccctccccatgaataagctcatacacggtcagaaccgaccccctctgcccagtgccctcaacccactcgaccaacacatccgcccactcctcaggcctcctccaccaaatccacgcaacagccttcggcccttgcccagcaccatttcccaacccccctaaagacgacgcgcctcctgcatccgagatccactccgctcgccgcccaccgccgccttcctcttcgctcttagtcatccagtcgatgaccgcgcgggcctcgcgcagatcaaggcgcttgcgcagggccgtattgtggaatagcggtgtttcgacggcgtcgattagggagagacggtattggcgatgatgccggcaccaggattggatcagagaggaccatttctcgagctgcgagtggcgggttgttgtgtttggttgcggggtgaagaagggggggaagttgtaggttggtgggaaggggaagggaggtgttgttgtcatattggaagggattaaagagtgaagattgaagagcagatagctaaatggaccaaatagaagtagaaaagttaagacgagtagaatgtcgagaacaagaagagacaagacggtcgagagactccaagctgtggagtaaaaggtggggcccgggggattttctcaatttcgacttcggcctttggatttctctcgactgtcccctctgctcttcacaatggccacccaaaatccgcctgcaaagcgcaccaagcgcgaagagtaccgtcgcaatgtacaggcccagcaggaatccaccgatggctccgtcatcaagatgccgcagaagaaattcttccgccagcgcgcgcatgcgaatccattctccgaccaccggctagaatagtatgtatcctatctgcctgtttcacgttaaactgctgctacggggtttcacgggattctcgagctccattggcgacaattccttcgcatccgatcgaagactgatagctaactcacaccctaatagtcccctcagccccgcgcacatggactggtcatcccatttccctgcatttgtcgatccggatacatccaaaacgaacctcagcggagggcggaagttgaccaaggaggtcgaagtcgtggatatcggatgtggattcggcgggctgatcgttggcctggcaccattgatgccagataccctgatggttggtaagtacagcgcagcgatattccaactcatatatacacccggccgaatgagcaccgcaaaactaaccacaaaaccacaggcatggaaatccgcacctcagtgctggaatacgtcacctctcgcatccacgccctgcgcagccaacaacaacgcctaaagaacaaagccgcgaacccatcatcaaccgaaccccaagacgcctcaacacaacccgaaaacaccgaatcagccccggccccaaccccagccaacgacgatgaaatcggcacggagaaaatcttcccaggaaacttcgaaaacatcgccgcaatccgcagcaacacaatgaagttcctcccaaacttcttcggccaccaccaactctccaagatcttcatctgcttcccggacccgcacttcaaggcccgtaagcacaaggcccgtattatctccgagtctctaaatgccgagtatgcatttgtcctgcggcctggcggtctgctgtacaccattaccgatgtcgaggagtatcaccactgggtcctgcggcatttcctgaataatgagcagcaggagggtgaaccggcccctgctccgagtagtaaggatctgtttgagcgggttcctgatgaggagcttgctcttgatccttgtgtgcgggttatgaaatttgagacagaggagtcgaagaaagttacgagaaataagggaaacaagtatgttgctgttttcaggcgcaaggctgatcctgagtggcctgtttgaaaaggagtggagggaactagatacctaattagagaggagagaggagaatatggcaagttaggaatcattggatataaatgatatgacgataagagggggaggtgttttggggcgtttttccctcattctaactgcatgcatggccaatatcatacttcaacatcgctcatcgctcatcgctggcaatcttcgcttgctaacaaaaacaaaacataagaacaaacacccgaaatgaacccgaaaaggggttgtagacgtgcagacaaatcaaaaatcaagttatgcaacaatcaaacaccgacatcatgcgataaaagcagtaatttcgctaaaacatggtggccgtagcccggcaactaaatggtgcaaaagtctagcacatcccaggcgccttgagacggataccctcacatctctcacagatagccagttggaccggaccaccgatgatgcggcccttagctgtccgcttgggctcgccttcacgaacgaagaatcggccctccgaaccgaaaccctcgccacactcgtgacaattgaagcagctctcgtgccactggccaccgattgcgctgacgacaacatcgtccatgacctgttttttgcagcccagacaacgtggtgcggtacggcgcgagtggcagttgagacaccacgcgaagccatctttctcgacaaagggagtttgggaatcgaagggctatatgagaagaaatagtcagttatcttgagggcgaacgtattagaagggaatccacacatacatcaccgcactctgcgcagaagaagtggccgacatgccattcggcaccacatgccactaccacttctccttcaataggggtcttgcagctcttgcaacggggactgaacatctcgtggaaatctagatggcagtagaaacgtggcacgcgagcttcaatgtcactagaatcggtttttgataatctctcggctctgttggattccggttctgaatagaaagccacgcattcgaggggtgtgctgcagtggaaacaggtaaagcactccgggtggaatcgacatccgccagcggtcacaatttttccggaaatggaaagcgtacaacgctcacagcttgcagtggggacaccagttcgtgtatagggcgagtaccaacggctctgcgattgcggttttttccccgtcgggtggggtctagccgcttgcttggaagaagcctcgatctcggagatagtgggtactttgatgtccgggatatttatcacgggaactggagtcggctcagagacttcaatggtcggtggtgctatttcaatcacgggtagggttggacgatcgggcttcggctgatcaactggtttccaagttttgtcgaagctcacgattgggcgtcccactcgatcactgacagctgaaggcattggtaacttttcgctgcggtcccctcgttttttgctggtagctgcgcggatctcgtcactgcgtctctctctcccatcctggatggagacaagctcatccttttcttcggggggaggagtcggagtagcacgctcgtttctagcgtagccggccttgtgtgactcagtgggagaaggagtagggctttcgtttcgagtgtagccagcaacttgtgactgagtgggagaaggagtagcgctttcgtttcgagtgtagccggcattacgcggcttggtgggagtgtccttgggggtttcaaaccgcgaaatcttatccatcatagggctgctgtgaactctattctgcaaccaaggcaatggcctaggaatacggcctagggcgttgcgcggtttgtttttcattgctgacgagtcagacttggaaaattccgacttcggttcgggttccttctttggttcgggtttcttctttgtctcaatgggctcttcgtatatttgttctttagggttcttgaggattcctttaaatgaatcgctgctgacagtttgcggttcgggagcaacagactcctcgagttcgggtagtttgaagttgactttgagattcttctttgagggaccagccagagatgatcgtttgcgcagtgactccgggctagagttaccatcagaagagatacttgagccagtggactggctgaatttattggtcaaggggtcatattctcgcgaaccatttttaacagggctctggctgcccttgttggcatcaggattttggtatggcgcataagggtttttgaaagcttgacccggattctggtgcatccaaactagctgcgtggcctcatcctgggccgcttggtgaagtccaacatcgtcctcgatatccattttctgcaaggcctctcgtagtgcccgtgcctcttccttttcgtgtcgtcgttgcccattttcacgataggacagagcgggagatgccggtattgatatggtacgtgcgtgaatttgtgctggaaagacgttcttccggatcgagtgcgttcgtggctcctgagctaaaggacgacccattgcgccggcggacgcttgggaattcgcccggcgatgggacattgcgctgcctgaccgtcgatcttcaacgtcatgctcgaccggggtacgcatggagaatgccgaggatgcccttggaggaaggttatcagactgatcgctaactgcggctgctttgcctgggtatggacgagatcctgtcggacgggcaggacgattcgctcgcaaatctttcaagtatgttgctgttgactcacatcagctccgagccgtccgacaccgaagagttacttacagacttgatcgttggacatgaaggatgggccaggaggtgagacttttctctgagtgggatgtttatgcatcatggaattgcaaggatcagggatccaggagaagatatatggataagtacagaaaagagggacctagatgaactaagatgagaagagtctagttggatctacaattgacggtctgagctggctagcgtcattgggctggtctcccctccaaacaaaccccttgggcccgtcgcgaggcaacggatgactcagcatgggtatctgccgataagggcttgtttttatgaagccctataagcccttttggacaacaagtgtggataatgccaatgcctggcactcgagacctttccctttccaggttgatgctcacctcttgccgctttttgatcactaagtaaaactgagctgaatattctgacttgatcacgagccactattgctaagcaaagcgaaccaataaatcatatccttgtgtgtacatgtcacgtgacccttctctaggtgaactatcatcggctaacttgggcagaaagacccaaccggcagaataaatatagactaggcctaatcgggctagacgatgatttctatttcatgtctgtcatctgtcgacgagtttcatctgcaacataattatctcactcaatgggatctatatcctaaacacggccagtatgccgtggaactacttgcggttatttactcggaaaatgttcgaatagggaggaggtgtgagaataatgacactagcgccagcgttaagtagaggcttattcctgatgaacgcggcatgtccttcctctactattccggatgtcgaattgggtgataatgggatgagacacatttggaacggatcgttgaggatctccgtggccacatagaaatgggccacagtccatctccaatcctgtcattccgggtgagctaggcaattaaacggatgacgataaggtacatttaaatatataaaagttaatactcagaatcttagccctatggatacatggctctattcaagctcatccattattgaaaccttgggatgtcatacttggctgtggagtatcttgtgccgagaagccggtgcggagagaatcgagttgggcagatgtgggggaatttttagtcacgagaattgcatagcttcggacgcgagtagctgtatattagcttccttcattggtctgatagagccgaatctaaataataaaccaggtccgtcctggggatctcgcctctatacgaaccatgttccaaggtaggattcggcattcagtccgatagtccgatgactccaattattttattaccaatgataaactgatcgaaatctagtccctttttctcttagcgtgctcatttaactcttttgcttccttttacaaaaatctctatgtcgtgacgaaaacggcaaccggtttcggtctttaaggagctcgtgatctcggaaaataacaagccgggcttgtatctgagctatcatcatggcggataatgtgcccatcgatatcatccgttcccatgaggacgaagtggaccgtgagagcgcagaacagaaagagacgttgtatccactgtcggcaccattggaagtcgacgaagatgaaaaatataagcacgatgtggccccggacggtggctatggctgggtctgtatcgcctgtgttttctggatcaatgcgcatacctggggtatcaatagcgtgagtcattagtcttcaccttcaaatttgcaccttcgtcttactaacaggtctaatatccagagctacggagtcttcctgagctattacctctcaaacgatgtattccccaacacatctgccctatcgtacgctttcacgggcggcttgagtatctcctgtgccctcctggtggccccagtagccacccatatgatccacaaattgggtgtacgatttgtcctcaacctgggcatcttcttcgaaaccctctctctaataggggcctcatttgcaacccagaaatggcatatcttcctcagccaaggcgtctgtttcggctggggaatgggcttcctcttcgtgggcagtgtcggcatcaccccgcaatggttcgacaagcaccgcggcgtagcgatgggcatcaacgccgccggatctggtctcggtggcctgatgtactccctcgccgtgggcgccattattccgcgctacgggctagcctgggcgttccgcattttgggtatcatttcgtgcgtcgtgaatctggtctgttgtaacttgctccgggaccgcaacaaggctgtcggcagtagatttacggctttccatctgcccctcctgcgtcgcccggagtttttgctcttcctcgggtggggggtgttcagtatgctcggatatgtggcgctgctgttcagcgttgccaactttgctctctctgtcggtctctcgtcacaccaggggagtattgtctcggcgctgctcaacctgggtcagggtctcggtcgtccgtttgttggcatgttcagtgacagacttggccgtattaatattgccactttcctcactttcctctgcggtctgttctgtctcgtcatctggacttctgctgacagtatgggtgtcgtatgcttcttcgccgttttggttggcactgtcgcaggcacgtattgggctactgtttctcctgtcctggcggagattattggtatcagggatctcccttctggcttaagcattacctggctcacgcttgttgttccttgcactgtctccgagcctatcgcccttcagctccgcagccatggtattggtggcgagacttcatatctccacgttcagatatttactggattcatgtatattggtgcttccatgtgtctgtgggttgtccgcggttggaaggtcggcgagctggagcgtgctctggcaagccgtgattccgtcgtccagtctggcccattgactggagtcaacggcggaaatgagaagcaaaactgccctgcgactatttccccggccttggaggccactgacacaaacattccgttatgggccccggtcagcttggtacgcagaatgatctcgttgaaaaaggtttaaataactgcgtagcgcagagtacatacatgtcacacaaatgaacatacaaaaatagacaatcgtctgtcattcatttgatttgaacgccgttttaatactaacctacatggatgtagcttttgtttcatgcctccgtaaccaagatccggacccttctcttgccggcgccacgaccttcttccttgacggagctgacattgacacgaaccttttggaaaagttcaacagtcacactgcgttccttctccgggtgacccttctcctccacacaaagggtatattcctcgctgtcaaactccgtagtgcggtgaggagctagctcccgtctctctgcgacagaacgagctccagattcaccgggtaggacgaagtcctccagacgaacgacaccttcaatgccgaagcggggaacaaagatgacaacaccgttctcgaacacacgcatcacgtatccttcttcttcaatacccgcatcaacaccgtcggcggccatcttctctccacgggccttgagagcctggcccacgtagtattcaatactagcgcggccagcatgctgtgcattgcggtgacggacgttgatgttccggcagatgtcttctagcttgttgcgggtgctgacaccctcgatgactgcgtgtccatcctcaccttcatacccaatggcagaagccaattgccggtgaaccatcagatcggcatatcgtcgaatgggtgaagtaaagtgggtgtaaatgggcgaggcgagaccgtagtgacggaattcggattcgccaaaggcccccgcgcagaaatactcggcagaggtcatgcaacgggtcgccaagatacggaccagggtgttgaagaatgggttcttaggatcgatgcaacgatccaaagaatcagccagagctcgtgagctggaaacatccagctccatgtctcgcttcttcgagagttgtttttgaaggtcctcgaaattttgaggcgggggagtggcgtgccgacgtagcaaggccgtctgaggaaaggactcatagaccttcgaggcaacagtgatattggcgagaagcatgaactcttcgaccaagctattagtgtcaagcatagccttggtcttgacgtccgtcaaaggatcgcccacttcatcgccttcactctcaatgcggacttctggggaagcgaggttcaaggcaccagcgtccatacgcttctgacggagaaccttggagaatttcaagagagtgcgcatgctttcggtcagctcgtcctgctgtgatttgtcgtcaatgcgtaactgagcttgttcgtaactgaatgcttcccgggagcgaatgaccgacttgctgaaatttgaagacactatctcggcatcaggtgtcatctcccactgaaccgagaacgcatatcgttcaacatagggcttgagagagcaaatatctgtaccaagaaggtgcgggagcatgtcgatacgcttatcgactaggtaaacagtggttccgcgaatactggcctcgagatccattgggttgttgggtttgacgaaatgtgacacatctgcaatgtggacaccaacctcaaagtttccatttggcagaagacgcgcgtgaagtgcgtcgtcaatatcctgacagccgggtggatcgatactgcaaataagcaagtctcgaagatctttccggccggtccagcctttatcctccttcgagacaggaaccttccaattatgaccttcagatggaaggcagtccaacacagatttcgggaacggcttatactgcacgtcgtattcaagcaataaagcctcggtttcggcacccttggtttcgagctctcccagagaccgaatgaagtgaccggtaggatatctcgaatcgcggtcccaagaatcgatggtgacaagaatacgctgaccgagaatatcgctagcctgtcttgtgcgtactctgatcttcgggatacgcttgtccatgggtagtaagaaaacgttttgttgccgtctaccagaggcctgtgagccagtagaattcgagtcaacgtgaccaacgtattgacgccagctgcgcttgataacaccaacaaccttggcagtaggctgtggcttgccatccgagttcttgccatgggcctttttgacttcttcctggagggctttgcgttctctgtccgttaccacagcatcggtctcctcagtatcagggttatcattacgggtcacggcttcctcatccacaatcttagtcgaagggctcttccactggtcctgtggtagtacttcgaccacgacagaatcacccgcaatagcgcggttactattatcacggcccaaaatgagaagaggtttatcgaaagccgcggtcttgacggaggcttccaggtagttgtaaggagaaacattgaacactccctggtgcaatgtcccggctcgcagaccagtcgtgagctttgacattgtgaaatattcagggtagaaaaactccccgcgggttgtctctttggcatctcgcgcatcctttgactcgctgatcatatccagcaacatttcggacccctctaagccggagacatagtcggatagcgacaaggccgccacattttcttccttgcatttccgaagattctctttgtcatcagttatgacaacaattgccggtatcgccttctctttcttccctttttttgctgattgttgcaggtgagaactgtaccaggttgctaccatgcgcacggcgcgatcgttcctgtcgttgattgtttcctccgggcctctgcgaacatgagtctctcggcgaaactcgttgaaaaagaggtagaagcgcttttcgtctgacttgacgagggccagaagacggttgtaaagtggtattgatcggtttctcaattcctcgaggacagtctggaggacaatcacatcgtaaaaggccccagtgtgctcaaaaagatccattccattaagcagcgcatttgtatcgggaacaatgtagtggcctcgggggaatgccgttgtgccggcggggcgatcagataggatgaacggcgcaactgtttcgattagcaacttgcttgaccattaccgtaataatttccttactttttccattggcatcagccggcgcaatcgtcgggcattgtgagcagagcttagaagagcaaggaatatcttctctcaaatagagctcgcggacaatcttttgcacctttccacttttcgtagacctaacgaagaccttgctggtaacatttgcggcctgcgggttggcagacaagtctcttcgtaaactcttcattgcgacggtaagattccactgtctagcagtggctgaatctgtcaaaacctgtgtgtcttgtgaaagatccgaggtgagagccttggcgagaagaaaggttatcgctgatcatcgcgataactagctgagtcagcacacgggctcgtcactttggggtcgaaagatgccatttgatcgctacaggaaaggtattttgtcatagagaacttggttttggattctactctagatctctttcagattctgaacttttatcactatggttttagcggtatgtgctgaccatccatcggacgtgagccacctagctaacaacttgctttgatttaggccgtggggcagctatgttcgactagcaacataacttcgaacctagctcaatgcaaggtgttggttcgaaaggctgctgcagcaggtgccaaggtgatattatactattccacagccaactttccgatagacagctcatatatgttaggtgctgtttcttccagaggcatcagactatatcgcatcctcggcagagcaatcctactccctcgcccagtctgaagagagagctagctttgtgtcgtccttacagaaagatgccgaggaacagaaaatccacatcaatgttggaattcatgaagtagcctctgaaaccaggctcaagaatttattgatttggatcgatgataagggaatcatctcccaaaagtaccagaaggtccatctttttgacgttgatatcaaagacggacctgtactcaaggagagcgcgtaagccttttttcagatccaatagttgacttatcaatcgctaaccttccatcaggagcgtccagcccggacaacaactccctaggccatttgatacacctgtagggcgtgttggtctgagcatttgttttgatgtaagtaatggacgttggaatcacatcggacattaacttcttactcatgctggatcatttagttgcgttttccagagatcagcctggcattgaggcggcagaatgctgaaatcatcacatatccatcggcattcactgttccgacaggaaaggctcattgggagcccttgctacgagcaagagctattgagacccagtcatatgtgattgcagctgcgcaggcaggcccccataatgagaagagacgaagctatggtcattctattatcatcaacccgtggggtgaggtggtggcaaacctgggggatgagtatcaggaaccacaaatcgcgaccgccgatattgatctcgatcttgtggcgaagattcggcgtgaaatgccattgcttcggagaactgatctatatccagaaatttgagagccctattgtgaacagcgaggaggcaaatgccagtggccctctttctccagtacatcctgcaaatagcctatcagatatcacttccatacagtttaacttaaatcattttcataatgtgcttagtgcgaattataaccatttttctttgcgaccggagcacctataagcaacatgacggaaagaaacttcgaaaagtgtaaagtgatacaacaaggaacgaacgaaaatagatgagcatgcagaaaaaacctgtctaagaacgagaccggaacatcatatctgccgtcgcaagtagtacagacataaatcgaaatagtccctctttgatctctatgtacaacgtacaacttggcgtttattccttgaccttatcagggtcctcgaggataccctcagcttccagtctccgacgagcctcttcgagagcccatgtttgtatactatcgcaattgtcagtattccagttgcgcgacgagtataaacgccaatattaaggcactaggtcgggatacaggttatacgtacgaagtatcaggcttgaaaacgtatgcaacaccggcgaccaaaatgcttccaatgaatccgtagtaccaaatgttctcccagccttccttcacgtacttctggccgggcttgacaccgaacagccacccggtgggaggatcatagtgatcaccgtgatccgcggcacggatactggatcgagttgagaatgcctgggtcttttgagactgacgaagcaggcaacgcgcccggaggatgtgcgacaatggtcgggcactcatcttgaagatgggatgaaggagggttgatgccgaaacactggcgtgcaaggagattggtgagagtcacgagggacagaatatccttgctaaattcaggtggtaaggacggtctcaattgatatgttgcctcttgcggtagagtggaggggggggcttcggcgggttgatgttgaagccgtaaaaggccgggaagctgtccagttatcgcgctagtctactttgggcagttttcttgtccgcctttatacctgttatttcaggcacaactacgctcctgccttggaaaataggtgtcatcactacacacgcgacgcgttcttatcacatctggccctcccatgctgcagggcgctggactcgccattcgtttcatctttctatatgcacgactcaagaacattcgaagtaactgaaccggtaaataccatcttttaactggtatgttttatctcagacccccaaaatatccccatttctgacaccgtcctactcagcctccagcttctacgcggaatgtatccttaccgattttgagcgcgtcattggatatttccgaatcgaagcaatggcaacaaacaatgcataccccatatcctcaaactcacgaacaaagttgagcgcttttcgcttccaggaaggcgaagtagttcccgacggcgccagctcgaaagacgagacgacatcagtcaatgggaacaaacaacatgaggatccgggctctaacagtgtgagggagccgatgcagacttcttctgataaaggatattctccgcctctcgaagctcaagcaccggaaccccaattacaagaatcaaagccgattaaagaatgccctcagactccgggaaacaagatacctctggcagatttgatcagcaatgctgaggattcgtttaatcctgccgaagtcccggaaatgacgccagttgatcaagtcatctggcagcatgtgcctgccagctcgaacccagacacctcgtcccagacaccagcgggtcgtcgtaggaagcgccggcacagctcttcgcctactggctctccctcgaaagggactaagaaaaaggtgcaaaaagaaccctttgatcttaattcaatacaagtcctattcaagacaccgcagcatgatatggccgctgaattgtggagtaactacatggataaaaacatggtcgatggcccggatgatcttccgccgccacggttcgcaaatcttctttcctcctcaccccaaacaccaggttcgagcagaacaagtcgagactcgtcagggctgagacgcgcgattagctgcaccaccgatttccccacctctcgaacaaaacggcgacgagtcaatgaactagatgtcagccgtggcatatttcaacgaactaacagcaatgtcgaatctgggagacccaagtcttccaggatcaactatcttatggagaaaattgaaagaagcatatacatggccactgccgatgcgggtccacctggatcgtcacccctacgccaacatgtggatacacggaggtgccgatcgtcttcacccacgaagaactggaggcttcacgaggccgacgaagaaaccactgaatccccatgtgctgtaccacctgggaaagtgagaactgggaaactgcccagtcttcaagagtcgtccgacgagttcggagacgatgatcttgatcaaggtcttctggacctggttaatgcctcggaggatcctttcattgagccggcacatgcatctaccgagtttgtgtctctggggtcttctgaatgggctggccttgacgcagaaaagtctcgttcatggcagcctgaagattcaatgctcaacagcaagcctctcatgacaataccccatagcactacgactaacgaaacaaaacgcgatgatatcgatgaattcgatgaatttgaatatgaatacgatgatctgcctgacaacttgcaggaaatacttgcaaaatgtgacacaaagcccgttccggtcaatctattgaattcaacgaccgctggaccatctttgcagggatcagatacaatgaataccccggtgaatggcagtatgcatagcaaacccccaaccgccatacctgtcaaacctgaggtggcatcatcggatgatgagtttgatgatgattttgatctggaagccattgagcaaactatgaagcaagcaggtgaaggtggactcgctcatgttcgtcactcttagtcagttaatttttagatatatgctaagacagtcaaaacaaatagaacctcaaaggtcgccaagctatcaaacgttaccgggtcgttgagatcacgaagagcacatatgttaccccgaaaggacgtactcagccagagcaggtcagatacattgcccttgcctaggatatagtcccgtccgctgactttgagtacagggcttgctagttgaagacgagaaaacccgagaccgcaagtctattatcttgcgagagtcatggttcgacactccctgcagcaaggattcgtatatccacctagtcggggacttcaacgtagccggccaatgcattgtggataatttgaaccacatgatcattcttcaccccgaccatctcatttcagctacggtcgtagcagactcggtagactgccagcgacgagctgtgcttcaagatcgagtcaaagtcattggcgcactcgagcgaccgcaagcctttggagtgtttttccacgaagtttttcaagaagctctcaaagcgaacaaatgggatatgaagtcattgaagacattggtcgaaaccgtcctgggcagacacatcgaagagctgtactcgattcaaatgagtatcccagaagctgttgaatatctcatgagcaggatgcctgctgttctagactgggcagatgctttcctgcatctcaagccacaggtacgtctcacggccgctggatgggcgaaagaggccaagaaaccttgctaaccaagatcaataggccaattctatggttgaagaccgcaataactctaagctgaacttgagtatcaacaaactgcttgaggtagaggagcacatctggtccccaatgtatggcctcaaaggcaatatcgatgcgacggtacaagtcacttgccgtgaagatgaaatggagaagaacctggtggttccgctggaactcaagactgggcgaagggatacaagccagtcacatagggcccaaacagctctctacactctcctcctgtcggatcgctatggtaagtaatgaggcctccgatcctattccgactaattgactaattgctaaaattatcgcagatatcgatgttacatttgggcttctctactacctcgagttaacgaaaacactcagcatccgtgcggttcgacacgaactgctccagatgatccaggtgcgcaatcacctctctggctatattcgtgagaggcagcagcttccaccgatgctgaaaaaagctcgtcaatgtattcgatgctatgccaagactccttgtctcatctatcacaagctctccgaggatggcgatggcgagaccagtgcacttggcgaggatttcgatgcagttgttggtcacctggacaacggtgatcgggacttctttcgcaaatgggatgaacttctgaccaaagaagaaggtaatctcgtgaagtttcggcgagaactttggacattgctgagtagcgagcgagaagccctgggtcgatgcttcggggatgtcgttatcgacccgcattctgcgtatgaggagaagactgggacaaggatcaatcgctaccattatacgttcgttaaaagacaagcgtctcctggtttctcctttgctgaatcccaaatatctgtcggtgaaccaattgtcatttcggatgagaagggccattttgctctcaccaatggatacgtgctgcatactagttcttcacacatcaaggttggcgtggaccggaaacttcgcaatgcacgatcaaagacgactggcttcgatgaagtcacaaatcagtctttcaggggaatcatggagattgggaaagaagagcctgctgccctgcagagcccagacgagcagctcgtttaccggatcgacaaagatgagtttagcaatggcatggccattgttcgaaataatctcatctgtatgatggataaagacttgttccaagcgaggcagcttcgacagctcattgttcaggggcaggcgcctgccttcaagacgatgtcgtcttcatactcgatctccgatcctggcaatctcaacgtagaccaaagacaagccattgacaaagtgatgagcgccaaagactatgctcttgtccttggaatgcctgggactggcaagaccacgaccattgctcatatcattagggcccttgtttctcaaggcaagagtgttcttcttacgtcttacacccacactgccgtcgacaacattctgctgaagattcgagacgacaacatccgtgtactgcgtataggtgcaaccgccaaaattcacccagatgttcaggaatttgccgatcttgccgcagtccaaaaatcaaccattgaagaacttaaggattcatacgaaaagccgcaggtcgttgccactacttgtctcggaatcaaccataacattttcaaccaacgcatttttgactattgtattgtcgacgaagcatcgcagatcacgctcccagtctgcctcggcccgattcgtatggcaaggactttcatcctggtgggtgatcactatcaattgccgccgcttgtgcagaataaagcggcccaggaaggaggacttgatatcagtctcttcaaactactatcggatgcacaaccaggttcggttgtcaacctagagcatcagtaccgcatgtgtgaggaaatcatgttactttcaaacactctgatttactcgggccgtctcaaatgcggcacgccgcaggtagcagcccgatctttggatatacccgacatcaacgcactagagaaattccatggcgaggacttgagtcatgctctgtcacagtcaacccgagaaatatgcccgggtgtccccagtagcccgtgttggctccgagacttactgacgccatctgcgaagacccgcctggtcaacaccgatcccatcggccccgcagccctcgagatagcacagggaaaccgtgtcgtgaatcacatggaggtcttcctttgctcgcaacttgtggagtcattcattgcctgtggtattcccgcgcgcgacattggtgtgatcactttctaccgcagtcaactctcgctcattcgccagagcctgcgacgctacggcccagatctggaaatgcacaccacagacaagttccaaggccgcgacaaagcggtcatcattttgagctgcgtccgcagtaacgccgaaaacaacgtcggcgagctactgcgcgactggcgccgtgtcaacgtcgccttcacccgcgcccagaccaagctcctcgttgtcggcagcagatccactctccgtgatggcaacgagctcctctgcaaatatgtgcgcctgatggaaagcaaaaattgggtttataacttgcccagcggagcgatagacaagcatttcttcccctcttgtaccacacaatcgcagctcatgtctccgggtgcggctttgactcctcgctctaccaagggcaaaggtaatggcaagaacaaattgcctccttcgcgttcttcccgtgaaccactgagcccattgggctcccgacaagcagcgcccggtctacgaaagccttccaagacaggtgcaaagttgttcaacggcacgaaggtggttgggaatcggcccatcttacgagacatagtgaatgacttgacgggctagcacacctagcatacaatgtttcaaacaaggcccttgtttctgttcttcaaatgcagatcgaggcgtcgcgttttatcatcacacgcgacttggcacgctgatacaaccattcgtcttacatatggttttttttcttttgggcttgggaaatacactaagcactgcagcctgttggttattagctgtcaaatgtagtcccattgtgaaactgtagttttcaaataagcaacagcagacgctcgacattcagcctctcaattaattgaatttacaatggaattgataaatgaaaaaatcgtattcatgtaggctacaatccatgtgtacctactgcggcaccttgatcaccgcccttctcatgggcaaacacctccttctcaacaccctccgttctttccttgaatcgctcgcaaatgttcacgcatgtgctagaagagcaccatctccgcgcaattctacttagtagaaactcgtgccttcttcgcctggggtccattcaggtaggtacggtcgccattggggctaacagtccaccgggcatggttgtttgggttggccacaaaattggtaggcacgatgttctccgcaaactcgaatgttctcttcttaggcgaagcggcagaaagggaagaaacagactgcatgtgctcctgggtaggggtgtaataaggtccctgcatttgttgggtgggtcgccgaacctgctgggccgctgaggcatggagttgctgggtttgccgcatggcagactgcacgcgcgccttaaaaggagtttggtacaaggtgggctgctgctgctgagccactgaatcttgaagtttctgggatagtcggatcacagacgccatgcgctccttggaaggggtgtgatggactgcttgcatatggtaggcgggctgctggacctgctgggcctctgtagcttggcgttgttgggtttgttgcatcaaagatcgcacgcgctcattgggaggggtgggataaactccctgcatttgatgggtgggctgaacctgctgagttgctgtagcttggtattgctgggtctgctgcatcgcagactgcatgcgctcattggtattgggaggggtatgataaattccctgcatgtggggggtggcctgctgaacctgtggacccgctgcggttgggaatggatgggtctgctgcatttgatgctgtcgctgagaccggtattcacggacttgcgctttgtgcttcatgaccttgtccagacacagctgaaactgctgttgatggagccgacgctgctgttggtagatcaggagctgctgttgatccccgggtggctgacgttcgaggtgagcttgctgttgctgaagttgatcccattcaacacgaagatatttctcttcattttgaagacgctcatggatttcaagctggttctgttgactgggatgggctgctgccactggcgtcatcaaggtagaaacaggggtcatcggggcagagaactgagtcattggtgtcatcggggcagacgcaattttctgagatggcgtgactgaggccaagattgtttttcccttcgccttgcgtggggtgctttgcacttttgtcttcttctgtttcttgtgtagctcgtcatcttgcttcctcttagggacccgcttggctgccttattgggtgactgcttaggattagggcccggtttgccttgtgaccaatcaaagaccttgaccgtttcagttgctgagctgggggtggcaggaggagctggagcaatattggcgatgtcgctgactgaatgggtcgcttggataaccggggcatcagtggcaggagtgacttgaacagtgggatcactgatgaccgaagcgcgctgggtgaatttagcagcgaattgcgtgactgcagcgactcgagcgacatgggcagcagtgataggagcggtagtaacaagagcagcggtgacaggagcaactttaacagccggatcaatgatggcttgagtatgttgagtgactggagcataagtggcgcaagcaggtcggatgaatgcaaggggaggacccaggtcggcgttttcgagagacaagagggtatccagcggatagactgtgctaggctgcttggtggaagtgctcagtttggtggaagtgctcagtttggcggaagtgctcagtttgggcacatcatcatcaacgacgatgggattacacaagccaccgtgaagctccaggtgatccagagtcgctgggccaaggacagggtcctcaccgagtgggacaaaggcatcttcgaaagtcgagccggacgtgttgtcctctccctcgaagtgatatcctaggaacacaagtcagttcagttcgactttcgtaaataaggagatgtacgtaccattagcacgagcgagttcccaaaggtcattggggaaacctgtctcgggaattttccattcttcgaggcccaggatacggccttcattagaaggcacaccgacggggctcgaattaggcttttgcgagtcttgatcgcaaggcacatcgacaaatgcgtcgaaaaatgattgggtaggatccataataggctccataacgaatgatagaataaaatgtgaatgtgaatgtgaatgagagtacaggtgatagagctgtcgagtcaaagaaggtgcagaaacacacaaaagacggatgaagtgtgttgattgctgagcgagtggaagactcgaagagcacaggctatgaaacagctaattgtatcttgtagtgaatgaatggtggtgggatgagaatgaaaatgcaatgagcatgggaaatgggaaggagagagaggaaagaagaagaaaagaggggggatggcagaagaggatcgtgggagtgtagcgatgtagcgatgtgctcatgtgctctcttcagggcaagataatgggtggttggagccctatgccccatggggaagttcaagtgtttgcaaagggcaagagttaggtcagggctcggtcactgatgctcccatcaactcccaacagaaagtcacccggccagttcccacggttccttcgtccttcacctgagacgtctggctagattcactagactgtgcactagactgtccactaggaagaaccataaccatgaatccgtcccttccttccacggcttctttacctagagtagcgacggcaagtgcaaaccagctggccttggtgttttgcctttccattagacaatgttagctcttgaccagcctttttttgtaaataatattcgtgactcacaacatattgaggaacagctgcatagtccaacgggaggatatcaaaccatgccattttaagctcatcaaatcagaggcctggccttcctctgcgtctggagccgcataccgactaaggtacggatcgacgtcatcttccccagacaaccgcggagaagccatctgaaccatggcaatccattcggatagggagccacaatattcctgcagatcatcttccgacatattctcgagtactttcccgttttcgtaaaagggcggagtgattatttgctcgtgggcaatttcctgtggctcgcaggttatcaactgtggttgaaccttgtcgatcggcttgtttcctgctccaacttttagtatattcttgctactatttccttttttggcttcggagacatgatcaccttcacccggaccagggttgctttccaggtcgtggaagagccaggccattgattgagtcagaacattggtgaatgcccatacaattctttcgaagcccttcttgccatgcagcatcgagggcagccgtaagttcaattctaccactgacgacattattagtaaatattcgaccagcccatttgctctgattgtacatacagaatctttcttttgcatgttttctgccgccgctgcggaaaggcttgccagtgagacctgttcgctcatatatctcctttcctagttcaattcgaagtacgcctatttccattcgagtcaactttcggtcctgcaacggagactcttccagccgcagcttcggggaaacgaaccgtctttgagtgtgaagacattatcggatcccgagcgtccttcggagatcatcaaaatattccctatgtcccaagtcagagtgccgtctttgatgaaatggtctctctgggcacaaaagctgtctgatgcttgtgcaaatgatggccactcaaatgtggaagagcctttatactggtctggcggagacataaatacctgacttgatgtatgtgttgaagaattcatgctcaagcagagccgaaggagtcatgaagactcgtgcatatcgaggtttttccagtttggtctcgagcgacggcttgatctgtgagtagaactcctttggcaggataacctcgacctatgaccaacaatcagtcaaatgacccttaatctctcaaaaaagccatagaccacctactgagtgtacaaatgcatgattttgaatcgttgaaaagggcgatctcttgcttgggacctgctttgggttgatgaacgccggcagctgagtgatggttgtgaagcacttttcgcgacgagacgattcgtctacttcttgaaacatgttgtctctgatagttttcgaagtgatgctcaacgttgacaatcgacgctctcgagttttgaagaatcaaatttccagccgaagggtgaggttcgattaagctcgggcttatcggacccataaggctgcagctatcaaaccttccacattcaaatggaatttgggatattctatcaacttctaggtagccattgtaggaatattatacagaaaccagatgtattggccttgaatggcatgtatgaattcaagatcaaggttatcaataaatattagtagtctcaatttcgtaacgagtataatggctcaatgtagctttgctcttatgtcacttgtaaaggtaatctgaaattaggtagagctcagtctaaatacttctgaatagaagttcactccaatggctcttattatgtggtcattgtgtacatatatgcatgtattcatatagagcaaacaacatacacgtcaattagaatggataatgcatctaaacaataccaataacatacaacgtacgcctctacaaagaaacagaaaatgtaattaattcaaaaacaatcataattcaccaattgtaacctaagaaatcatattgtctatggcatatttcctggtggtgtgccaaaacgcattttttccgggaaactgcaaggcgtagctaattacaaagctcactcacttcttactatttactttatgtaattcccattttttctagtgacccaatcgcaacttggacgcaaaatccaattccaatccaatacattatacggcacagggagcagttcacccaacttctgtaatttgtttttgaaacctcaccaataccaactttggtattaaccgaacatataaagctgttttctgatctctgtctccgaaagccgctccaagccgaaagaaccggtcgaatcatcgacaacggtcgcccgctcaacaaaccaatcggtcattttatacccatcactatcgaggatcataagctggataagaatgctgggacgtactactacccccgcagcggtcaaaatgtcatcatatccctgcatggcatgatatgtatcggcattataattgagttgtggccaaatctgaagtgaaaacggtctgtatattgcttccggtatcattggagatttccacaatgatatatgggagatcctcagaatcacagtctgtgacgtggggtgacagtctgagtcgtgcgtagaactggttgaacgcgtcccgcggtcaatttcggaagcattgacctgggataaaatataccttatgcatcgcaccaggttctgtttgtacgcaagaattccagagtttcatctgttgccgttctttctatgacgagattagtcgttgaatctttttcaaaagaccttttcgaggatagggaagtataccatgtcatgctcgaggctttgctgtatcatctgccggctcaccccctgaaaagcttaggagttagggataaagctaattgttctacaagaagaccttacctcaaaccacactggtcgatccataattcctcgagatcgggtaaggaatgatagacctgaccgtcgcacacatatatagatctcccattgggtggtctaaggagaaacctaagcttctcagttttatacatattaatcacaaactgaatattggaccattgcgacttgatgctctcgtccttgaggtatccctcaagtttcttgatgcgttcttctcctgagacctcataggggtgcgagatagcgggaagagctttgctaaggtcgaacttttcgatatgttccatcttgactagaaatcattaatggatgatttgggttgaaagaggagtttcccatacaatatatggagataacgggagaagttagcttctgggtttatttcttagtggaatgaatgtaggacggaaggacagcgaagcggcagttattaagtatttgacctcaggtatcatgggaccttggggacctcggggttcacctgggcatcaacgacaagggtattagggtcttgtccactatcacatcacatacatgagcttggcaagcgccaagtaatcactgataaggaccactggtggtgccgataaagattccccggcagtatcgggctacccaaaggcggtatccgagtactctccaattcggtccgtctatcgttcgaatagcattcagtctaaaccgctaggtcctatcggtcttatttctgctactgcttctgccgctggttcgaatgcaggtagacatccggtcttgcgccaattgctagaggagcaagacgaagagatggcgcccgcttcgcgtcgcgagctcctacacaaggatcactttgcattcgtttttggaagcgtgaagactcaaaactacttagatcctgtttccaaaggaccaggctctcacacgtgagtgtggcttttgcgcccggggctgtcgtttatttgctgacaacgatctggaaccacaggattcgcactcttgcttggaacccaacgggccagctgattgccactggctcagcagatcgcactctacgaatctggaaccctgaacgtcctaatgtacgatactccaccgaattgcgtggtcacacagctggtatcgagaaggctcttttcaacccagtccgcgacgcggagctagccagttgctcggccgatggtacggtgcgcttctgggatgtgcgctccaaaacatgtgtgagccgtctagatgtcggcggcgaagcatttacactctcctggtctgctgatggcagcacaatgatcgtcggcaagaaggtaaccatgctgcgctgcgactccgcagacttgatctctctagtggcacagtcactaacatatgatatgtaaacaggacgacaccttaatccccgtctccgttcaattcccctcttctcctaccacccatcctgatggcgcaaatgctcttaacctcccctcctctacacccggcgcaaccacatacacagctctcgaccctcaccctcaaaccgtccaaacaaatgcgacaaccttctcctggtgcatgccgacacctgaacgtccggggcagcaaatattcgtgacgactggcgaaggcaaggtcaagatcatgtcctacccttccttcgatatcatgcacactctcaacgcccacacctcggcctgcctttcaattgcgctcgcgccgacaggccgatacctcgcagtcggtgggagcgatgctctcatctccctctgggatacaaccgactggatctgtcgtcgcactttgtccagcgagaatggtggtgctattcgtggcgtgagctggagcttcgatggccgctacattgtaggcgcatgcgacgagcttggatgtggtgggaatggactggagatcttccacgcggagtctggtgatagtatttacacgattcctactgccggcatcaatgccggtgtctctgctgttgcgtggcatccatctcgctactggctagcttactcgactaccactgatggacctggtagctccagcgctggaggcttgaagattgtcggtgctgctggtggtggcttgtaatctcgagccttagattttgcttcctcttcttgggcaggcctttttttagccctaccctatcaaactatcatgaatggacgtatcgagaaagaaaaaaaagggacgagtgccaaattagatcaatagatttattgattgtagtgcttgtagtgattggctattaacatggattgacaggccgaaatactccaattaccaaccgtataagctatccaagagtgaagagctccgccccaaaaagaccgttcattcgttcgtcatcaaatcattcaaaagcagagctcaatggaagcttatcaggctgccacttcactcgaacattgtgggaagaagataattgcaaaggggttaggagttccgtaagtaaatcaggaaaagaagatactcggtccaagatatcgtgataagtgaccccaatatttgtggaactagggcgagggagagaaaacaagcaaaagagaagtacccaataggatgacgacctgcttcgagtcgcatgtgagaggattgataaaggcgtcgatgaattagtgagaggctaggatctcatattatgagcagattgagggactcaatgtcatccgttcagcggcaacacgagagatttcacttgttgcaacaatctcaagcgagatgagttatgacactggagactattgaaccatattccaacacgcgttgcgctcatgatggccgccagttctcccagccagcgttgatcggactttcaccctggatttgaccattcaagatttgagcccattgagattcactgaaagcctccatgtttaggttaccaaagccttcattgcccgtttctggatttgagggtggaaggtcccatgcagagggcatggagaagatccccgacgctcctgcaaccgacgggctattagagctgtttggataaaaccgaccagacatggaatccaaatcggtggctcgcggatttgtgtttccttgtggcatgatgtctgaattgaccttatcaaaggactgggctgactcctgactcggatatcccgagtttgtctttcgattcttgtttccgggcggtgggtcgtcagcgccattgattgaataggaagtgttggaagatgagttcaaggttgagggggtgggatggtctgatggtgggttgtttctgtcgctgaggttgccgaaatcagatcggaaatccatgtctgtatcgataatggcccctggtggtccggcttgatccgtcgcctgagtggaggttccgaaaaagtgacttgtgtcatcgccattaaagactggtcctgcagtgggctgtgtcgttgagtccctgttccggcttgggagcgacgtcgtcaaaccggcaggcataggctgattgccgccgcgattggtactgtattgtggaggcacctccttcgccatcccttgtgtttggcggaggttgtatatgggagtacattcgaccttatcgttgcagtatgattgctagagaagattggattagcttcgattggccatttggaaacaagcccgggaaacctactaccatggaatgtgcagcagacatgttggttctctgtctatcgtccaaagcacgaatgccagttccatcaaggtcaacatccaattgaacaagaaaggactcggtcagagggtttttgttcttcatcgcggtcagagcggagacaagaaattgtaacgaggaataaacactcgagtcatctggtcgggatttaagatactgcacaaaaacacgagcggcaatatagagacaaaatgacatgaaaggattcagctgcaaggcgttagtgcaaatgctttttaagtaagaaagctcaatagaaactcacgctcgtcagatcaacgtggctgatcatcttcatggtactcgaaatctggtttgcggcgacaaggcacctgcgcttgctctcggtcgtaatctgattcggcatcttgttcttttcggccttgaatattgccgcttggtgaagacatatagttgaagtatgaatgctcatgttggcgaaaatgacgttcacgtccgagacgccacttgggagtcgaagatgatcaggcaacgagagcgaaatgtgcaaaagaatattatcatggctcctgtggcgcttccaaaaatctccattgaggtcatgatcgttgtcttggggctgaggccgatggatatgtatgagattacgaccgaaaagacttgccagaaccaccacgcatgcaaaaggggctagtgtagatacaccctctccggcaatgatatcgttcagaggaagtgttcgttgtggcttgctcttggtaaaagagtcttcggatgcggggaggtttgtcataatctgattgtcgtcagcatacagctctgcgctataagagggttcacgagatactaacatcgttctcatcaataagaatgggccagccagttccaacgctcgaatatcgatccgtggcaaatgcgccccagaagactctcctacgttcttcgcgctctgtccaatctttcggtggtaaaatggattgtttgacgtcgagaccaacaccatcaagacgattcaatcccagcatcagtgcgagtcttgcggctttaccaacactcagccaggctcgtgggaagaagatcattcggaattcatatgtgccgataaataaccatgtttggcaatgtgctaaactgacgatgttctctccgaatcctttcatttcgtccgcctcggcatatttgcgtgcccgctggtagaaatgactatgtaggaagaagtatttgtcgctgacagatgcggcattgcaccacataatgtatcgcaagcagatcggtgggcgcatattaggggcaagattcagggctgcatagtaacgcgggcggtggataatgggcatcattggatagattttctcaaagaataaagcgtccctgcacggtaccaatgtattagtgaccacaagtagaaaggcgcatagaacacgtacagttcatcgatcacgtcctgtggaggaaggggctcctctagtcctagactgatcaagtcccattgagagttgtcaccctgggtaattggcggcggaggatacaaaatttgacttggctggcctgcgccgggggcaatagaagctgagaacgaattatccatgttgcctccaatgcctgccagccctcctaggtccgaaaggtcgggcaaatccagtatagattcatcggcgataggtgctgtgaatgcattctccaatggttgaggttgggaggttcgttgggtgggttccggatcctggactttgagaagagtctctacctgagctgataaagtcatgatcgtcagtgatatagctcacggtcaatacggcatttgcgaccattgtcccagcaagttcgtacctaaccgcgcttcaagctgcttaacatatccccgtttaggaccactcttcttccgcacttcatcgtaagaacattcatgtcccagacgtgagcaagtcccacagctcgggcgtctcccatcacaccttagtttcctcctccgacagacgacacatgcgatgcgcttggggcggggaacgaagttggtttctccggtgctagtgctttcggcagcggcgccactttcactagacatgaattccatttgagacgggccgaattctgtggagtattgcgacgattcgggtccaaaagtagacgccggaggtgccgccatagcgggcttgattgcagacttgtgatctcggaatatggtgcagtaggtgagtaattcgagtgaatgaattgatcttgaatagctccggtttgtccgggcgcggtgttattaggcagaagctaataggatagacctgaggcgtcaagagccaggaacatccaaatgttggccagatgtgccgaagtggggatgtgaaaaggaagttctatgaatgatggcgaagttcgtatcagcagaggctgagcgtccggcccaacctgtctttatgaggagctagatcaaagagcccctatagttcctttcgatcggattctaattagagccatgggaaagtcctgaattttcattctaatccccaacaagacccttgacaggtgcgatcagcggagtgccacgcaccagctacactgcctggaggcttggcacacatctagtgggatccggctaatcagagtagagatagagtatcttgtacggagtatgtgcacaccattatatatatctactatgtgcagagagaggaagcggtttctaaatctattttctttcgctttgaatgcatatggcctcgagccatcgtactgtacagtgcccattgcccgagtttcagtctgcgcaaaacaataacccccaagaaatagcgcgtggtagaagaaacgatgagacatttgatgtgtagaaaaaaacaggaaaagatatcgtacagtcatcctctgcgcggtagggatgaggtatagggtgaggaggtacaaatgggtcagagacaaagcagagtgaaatgcccagttcggcaaagcagcatcatctttagttgtatccacgacggcgctttccttggttgcgaggtctggcatgaacaacggccttgttgatcttccactttgggcgggtcttgtagccggatttggtctagaggtgaaaagtaagagtcagcccgatggaagttcagaagatacaaaacaaaaggatatacataccggaataccccaaggactcttcgggtcgacgttacccttagactttcctcgtccaccaccgtggggatggtccatggcgttcatggccagaccacgcaccgtcggacgaatgttaagccagcgtgagcgaccagcctttccgagctgggtgtattggtagttcgggttgctggtaataccaacggtagcgcagcagtccttgtggatgagccgagtctctccacttgagagacggacagtgatgtgctgggccagacgctcctgcttctgctggtcacgctgcgacaagggcttcttctcggcctcgggctcttcgttttgaatcgtttgctgacgcgagtcactacccttggccacaactgtagcatatgttccagcactccgacacaattgaccacccttcccgggtcgcaatcccaagttgaagatcaatgttcccactggaaccatgtgcaacggcagacaatttcctctccaggcggttctggccgcgagcacaccgggatcgacagtgctgcccatgctcttccacaagtcttcgggaattccggacatataactctggaccacgtcgccggcgcgcataccgtccgcggcgagaatgtagctcaacttgccggtctccttactagaagtcagggcgatatgcgctgtgcgcccgggatcatactcgatacgctccactgtgtgcggccccggagccatgcgcagaaaatcgatcgtccgaattcgacgcttggcaccacctccatgatggcggacagtgactcggccagagttgtttcgaccacccttggcgtggccacgcttgggaaacgttaatttgtgcacagggcggcctttccacaaatgatcattgacaggacgccgcaaatgtctcacaccgggggttcgcggagtgtaggtgcgcagctgaatgccagaagcatcacggccgggtggaggagcgaacgagacattcgggtcaataaaagagttcgtcggcgtttcgatagacttgggcttgatcttctcaatttcattcacgattgttgaatagcctcggattggcaaaggcagagaggagagacacctaaagggcagccgaatgccccgtagggcaattcggggttgaagcattgctgccaaaggattgggggggggggaggatggaagagacggggcttaagggaatcaattgaatgaaagtgtgattgatgaaagccaaaacgtcaatagagcagaccaacaaagactcaacagctcctctcctctgctttgtagatatgcacctaactctccacaggaacaaaaagttcgatggtcacgtgactctcttactgcaccgcctctcccactgccacaacgcgtaaaaggtggctgatgtcaggtcacggggcttccacggttcatcgttgtcaatctcaccgccctatgtccgattcgatacacgtgactcctttgttacgtgaggttcgatactatacgagaccgaaacggtcgttgtcgcagcaaccactttatttactcgttgccatactcacgcgtatctcccttcattgctggatctacttttctcgactatctcagcacatctttttcttgtttctattccgttcttcattgctcagctcaattcttcatcctagaaatttacaatagagaggtcttgaacgccaacccggtgatccacgcgactggctgagtggggcaacttgttttccacgctaagcacagtactagggccaaacatcgccttttgccctcaagctctcttccttttccctcatcattccagttaaagctacccttccatcttcccaccccccccccccactccaaactaacaaattatcgcgtgcggattcctgttgtacagtgtccccagatcaattctgtatcatttgccatctttttccccgaattcgcgcgccatttgatcttcggaaccagggttctgcgcggtcttgatacacatcaacatagtctcctttgagccgtaagcaccgactcatatcatctccacctgtctgaaagctctctctgcctactggcattgtagtctcttcagcacaactgcattttcactcttggtacgtgcacctcgtccttcatcctctggtatgaggtccccgccaaggtaatatcaaatggaatgctgacctgatttcccgagtaggacaagaaccattatatccctgtcccctttctcccttccctacgcgtcgttttccttttattttcctcaagatgcctcaggtgagcaatctttagcctgccaaaacacgtgtttgatatcctagtcgcgggatatctaatccatagcctcgagatctgggtgtatcctatgacctcactagaccgaccactaactccactacaggcccgcagccttcgtacgagaagcacgatgaatgaaaacgatgagaacggtccgtcagcacgtgtgacacgggccaaagcagccgccctcagcaccgatgcctctgccgctggagctaagaaaggcctgcagactaagcgagccacatccaccaccactaatggatcgcaacgtcctcgtgctgcactcggtgatgtcagcaacgtcaacaagaccgacggtgctgagatcaaaggtgggaagaagccggtcgctgccaaggttggtttgacttcaaaggcaactgtccagactggaggtgttcagaaactcagccgcaacaactcgtcacgaaccgcatcacgatctgccctccaaccccgcgactcgaacaagaaacctggtcccaacgcccataagcgtccgtcgcttaaggatacagccatctcggaagagcctccccgcaagaagaccgagcttgagcgaaagaagcccgaggccgaacggaagaagcctgagctcgagcgaaaggcccgaattatcgagaagattgtggaagaagaggaagtgaaggaggtggagatcagcgtgaaggatgctctgaacgaggccgtgcaagatctggacactgaggacttggatgacccattaatggccgctgaatacgtggttgaaatcttcgagtatctcagggaccttgagatcattactctgcccaaccctgattacatcgaccaccagcccgaccttgaatggaagatgcgtgggatccttgtcgactggcttatcgaagtgcacacccgtttccgtctgctccccgagaccctgttcctcgccgtcaacatcatcgatcgcttcctgtcggctgaagttgtcgcccttgatcgtcttcagctcgttggtgtcaccgccatgttcattgcttctaagtatgaggaggtgctttcccctcacgtcgccaacttcagccatgtcgccgatgagaccttctcggataaggaaatcctcgatgccgaacgtcacgtcctcgcaaccctcgagtacaacatgagcttccccaaccccatgaacttcctgcgacgcatctccaaggccgataactatgatatccaaacccgcactctgggcaaatacttgatggagatcagtctcctcgatcaccgtttcatgtgctacccgcagagtcacatctctgccgcagccatgtaccttgcacgtctcatcctcgagcgtggaccttgggtatgtttttttttttaaaaaaattcgttttgcctgtgccacacagcccaactaacttgtcataggatgccactctcgctcactatgctggatacaccgaagaggagatcgatcccgtcttccaattgatggttgattatctccaccgtcccgtctcccacgaagcctttttcaagaaatacgccagcaaaaagttcctcaagggtaaactactttgataatccccttgtcgcgagatcaaatattaaccgttttgcagcttctatcttgacccgccaatgggctaagaagtatcaccacctatacgttgacgtctccgaccatgtcacttacaaggtggaacagtaattgtaccacttacgatgtcatgctactcctgtctcggcaaagtcgattcctttcatgacttcctaaggctcttgcgacgacttgagcagggaaatcgaattcctacatatgttggcatttcattgtgctggtattcactaccttttgcatattcttacgacgacttgattaaatttctgcgctttccgcatttgtcttctgtggtggggtgttcggcgcttgtccctgtctgctattgttctcttattttacccacacatcaacctcggcttgcttgttttacatgcgtgagcattgtctcccgcctgtcttgatatcttttacattgtcgtcatcgtgttgcaggagtcgggatctatttttctccttcaaatctcagttttaccttgtctcgccctcattcaccctcgtcataggttggacggtgcagtgttatcccttttggatcctttttttgtttggcatgcaagttcccaaggcttgcacgtttgcgtggcattgcggattggaatattttgtggagccaaggtggctatggtttttgttttgtttctcaggtgtttctcaattcatcggctggaagattcaattggttgctagagctgagtcttctaggcatgcaaaattggtatcagatggacggtcgaggaggtaatcagtgacaacttgggccgcttttgttttcttcaaaatagttggatttctaacactggatccgtgtgtatggcatgcttattggaaccatttctctttttattctttcttgttggttttctgatagatctggggttggttgtagatgcgtgcaattaagctcacctgggcctgcttagccgaggctggtcccgaggtccttccaaggttagccccggggcacggtaagccgctgaattacctttgggaaccttactagttgcatccgtccttgaggctgatactggactggattgacaataataacccaacatcccgacggaataaatatatgattctatctcgtcatggattccaccgcacccccgccgtgcccattctgcaatatcgcctcatcatatcccccaacccccttcaatgaccctgagttcaacccagtctctactgccccggattcaggtccattgtcccacatcatcctctctactgagcatgtcctcgccttcttggacattatgccgcttacccgcggccatgtccttgtagcgccaaggaatcattacaagatgctaggagacatgggtgttcaagcagggcaggaggtacgtagttatttaccatctgcgcttattccaaaacgcttccttgactgatccatgtctttgatttcatacatagatggggaaatggctgcctatcctctccagggttgtaacgaaaactgtgtttggcgatgatccagatagacattggaatgttgtgcagaataatggtatgtcttgcccttgcttttctccatttcccgaaacccttgatctttaaattatcggatttgaatacggggtatttctacgttttatgctgttatgtatgttatgtaccaagattggcattcaaggaggttgaacgcccctgaccgatatcttaatattttttgtcgctaaaacagaacggcatcttctgatcacatgtctatggaagaaggaaaaaagcaatcatctaactgagtgacaggcgaaagagcagcacaggtagtaccccacgtccatttccatatcatcccgcgccctgctcaaggggtcaatcagagaacaagctttgctatgttcggccgtgggcagagagaggagctcgacgatgatgagggtgaggccttggctcgtgagatgagagttgaactggctgaggaagtcaaacgaattcaaagagacgagggtatagacttggctggaggcttggtttcagaggaaagcaagcgagggaagttataaagcacgctgtccctagtactctcttttgttcttgcatctatcattggtcccgtcttcgggttttcgctgtatatagctatttccatcgatcggtgttcggaagtccccgggctgaagcttcctgtctgatttactatgttgaggttcttattctgtctttttttgatcctgatcgacccgggtgccgtggcctcggagcatatgctagttcgacaagttagccgggtagtaagtcatcaactcccaaataatacgtaccactcgtcggaatgcattgaggtcatccgcagtagtaccctcgtcgtcaatctttttccgggccagtgtaacatccgacagttctccctcaggtagacggcggtacgttataagtcggcgagcccctgtaagatataaaatcagccgatgcctttcgacatggttgtagcacaaggctgtcacttacaagtgttgaaactctgaacagagatactgacgatctcgaggttctgatgcatgggaacagggaactcggttttctcatcatttgttgtgggcatccacattgacaaacgcccattgggaactaaggagcgaactgcgaagttgagaacgtcgttttgtagagcctcgaagccatacggccttttgggagcaatgaaaccaggtcggctacaggttaaagtcagtatttcaagtcggagaggagaagcaagaacacatacagataggcaggaatgccatcaatgatcacattgaccgcaggtttcccctttcgatttcccaaaacacgaagcccttcacgcacaccgtatggcggatcgcacacaataccatccagcacggcggttctcgtcagtggtgtattggtaagatcggaagtgaacgtatcaatgaacttgctcttgatcccatattgatcgaagttctcgtatacgcccagttttcctttctctttgccacggaagctgcgaccatcaatgtctgcacccaaagtcagagccccgaaatgcgaagcagcaactatgaagctcccagttccgacaaacggatcaaagaacaattttccaggcgccgcaagagccatgttcgccgtaatgagactcaactctgcatccatggaagtcgtgctgatataacgacgcttcttgaggtcgtatttgagcacgtcctcgcgacagctatcagcaatcttgcgactgagataaatcttccgcggatcttccgttcgcgaaacgcccagtttagaaacttcaacgtcgtcgatgtactcttccatcacaaaaaactcctcatcggggtcttttagccggatcgggcctttgaaccccatatatgagaaggatcgaatgatctctcccttctgaactaggctgcgcgttcctgcaaagtagtcaattgtgaatttgaatgggacagcaatgtagtcgttccagcgatgctgagttcgtcgacggacatctgcatgtagctcttcatagttggtgccttcgccccaaagctcgaagatgtccttgactagaatactgcgcttggcaactgcccgcgccgcggcttcatctggtagtctcacgacacagtatggtgactagggatatcagtcaaaattctgcaaattgaggatagtcatgaaaggatagagagaggaagggtgacatcgttgtggaccaatattcatggagtatggacaaatgacgatcccagtatcgatagaaagggtatcatacatattcattgtaggtgatgaattcgatgtcggcgccggcgagcgtggcacaggcttgaagttccggccgtcggaaggtctcatggagttgggcgaaccgaaccagataatccatggctagcgagacgaatatctgactgctttattcaaggatccctctttagtgggagtttatgtaactcgttgctgctttgaaggcggggtgttgcgggttgagatttttttttctcgggtcttcagaaatatactccacggcgacaaagtatgttcagagatagtatggtttgatatctccaacaaaatcaattatgttttgcaaatactacatttagcataaagagataattgctatcttggaatatgacttaaatgtttcaatcgaaaagggctgtacacaagagaatgaaatgattgattgaactacagtcgacgaaacccaggtctacccacgtatgatatcgcaccaaaaaaagaaaaagaaacagaatacataagatatatcaccacatctagctatgaacaaaaacccaaagatacgccctcccttaagatagaagcaagacatgcccaaaactccacccctatgcaccgactacctggaaaacatgtcgtgactcatatccctccaccgaggtaatatccaccttctcatcggctggtatcatatgatgttgcagatcccaaccggcccgacgagacagttctgatactaccacatcacagtcacccaagagatcaatatcgaactcggtatgtgacacaggctacacgccatgatcagtatgatacattgtcaatttcatcagcatgacttacagtgcgcgatatatagatctgcgggacgtggcgaggcagaatcccgggtacttcagcaacgggggctaccttcaacgaggtcccgatcacaatgactaggtctgctagctcccgatcttggtggattagtcgttcgccaaactcatcgggcaggtcctcgccaaaaaacgtgatatcaggctatacttttcgtaagtatggaggaaagcaaacaagggattcaatgatcactgaccttcatcactccaggagtcgggatttcatagtcgtcctcatctgaactgtcgccggagaccttgcggtctttctggtgaccattggaacttcgtttgcgcttaagaccttgcggctttagttctctctttgcaatgctctccttgcaggcggtgcagtgggggacatttcccgccctgatttcatcgaagatcgtgtcgccagggacattgaacccacacttcacgcaggtagccctcgcaaaggatccatgacattgtacaattttttccggaagtaccccggcatttgcttcaatgttatcgatattctgcgtgtagttagtcaacagcttccccttgtcttgtagaagccgaatgaacgcatgggtgggcgaccatttcttttccgttgggagaatatccttagcaatggaaaagaaaatattcggatcctccctgaagatatggatatcgaagacttcttgtggatcgctcaggcccaggtgcgccagttttgaatagagcccggtatccttcgaacggaaatcgggaatacccagacttgtggagatctgataaaatacccgttagcacttattgaggaatattcaatacactttgctttgtacgtacacctgcgcccgttagaacgacgatgttccgagactcgcgaaggagccgaacagcatcgtcgatggtgttgtactggggaagcttaggcctccgggagaactcgcgcgagatcgcgaccgccagaagagaatgataggactcatccggtgcaccgtcgaggaatgccggaggcatgattccaaacgctgtgcataactttttggccgtgacggtttcgcggaggatgctctcttctacgaacgccgccttgccaatcgcatgcagacgctgtcggtatgcagtcgcctcttccagagtacaggcaccgggaactgcgacagaaaaccgaccagattagccaatattcgttctgatctccgaagcgggggtgtccggggtaagaggtgagggtggatatagttacataccgaggccgtcgcggatctggtcatcgcgtaggaactggatcgcctcatcgcagttagacagagtatcccatgcatcggaatcatcactgtccgtctccaaatccgacggaatctcaagtgcgaggtccggcgcgtcgtcctccatgtcgtactgtttctccatatccacggcccccacttcgaccacagtggtctctagcgaagtctctccttttggggctggtatcaaatccattttgcaggagtttgagattccagccacggagacaaactcgtttcactcgcgcttgcaatctgctctggcaaaaattcgggcgtctgcctcaccggaggcaacttaatccggaaccgatgaatgaattgcagtggcgatgtcaaagaagttttggtttgtagttcagggggttcggcatgaaagagagaattggggggaaaatcaaagaaactacttttagtggtatcaaatcaaacagatcaatgaacatgtacatcatctcatgtggtcgtcacttttggtatctatgaatccgccatctcatcgtcagagtcaacttcgatctccacatccgaatcctcgccttctccctctccttcagcttcactctcatcatcctctccaatttctttgtttatttcctgtacaagctccaaggcatgatcgcggagccggtcatcctcatactgaaggacatcgtagagcttcaagctttgcttgagccattcacgactagcatctagtgatgcatgtcgcggggactcggcaagctcatcagcggtcgcatccttaggtgcctgttgtttttctgccagcaggaagagacaccagcctccgaggtaccaggcctctacactttcatcatcctctagaatcaagcgctcgaggacttccagagcctcaaactccatattcacttccatcaggagtcgcgcaagactgatgcgcaccgcaaaatcgggaattctgagatcttctggggccaggtccttccagaggctcatactgcgagtgagcgcggcttgcgcatcttcagtgcgcagttgtgagatccggatggacgcgagggtctgtagtacctctggcgcttcgggtgtgacaagaatcgcttccgtaataagtgcttcacaccgagcttcggcatcctcttcccagctaagcgaaaatgttagcgtcagcgcgcaatgaagtttggaatatatagaaactcacgaaagatcggtcatgtaggtttcggcgacagcgcagagtgcgttagacaacttagtcttcttctgtgtaatatcggcaatctgctctggtgactttttcccctcaagagactgaatagtctgtctgagggacgccacacccatctcgaaccacaggacgctgtcctttccaccttgttcactcaattgtgcaagccataggaacttctcagctcctccaccctgggattccggtatcgagccatttgggtcgagttgaacagcctgaaggaagcagtttctggcggtgtcgatgtcacctagttcaacattgatttctccaagaaggttaatagcggggagctgtgcagtggtgttctcagcggtcaactccagagcctgctgtgctaccacgagtgcctcatcagctcgaccagtttgtaggaggattgtggcttggtcgagtaacgttgagggatcttgagccatgttgccttttgagattgagccaccagggccgagaacggacttttcgcggggtttggatgatttcttcttttgtggtctggactttcccatggcaggatgcagtaaaatttaataaataatggtgatgtcgtcgactagaatattaagcagagtgattgtcaattataacccacagggtatctgggagaagtaaaaaaaaagtgtacctccaaatttttggagcggctgtttgacaggtttgcatgtgggaccgcaatattgtaccatatcgtaatgataagtccagcatgtctacttgctattattcccatcgtccctgcacttactatagctaaccttggaatggtctattcttctagctattacacagagaagaacatagatgcatgaagaaagatgtttaaatttttttctaaaaagacttctcacaaccgtggttgtcgacatggagcattgccaccattgtgcaatctcactctacatgtagagatcaatcgccttctttctttctgtctagagctaaaatgactcaagtcggtttctttctgcctccccgctatccagtgggcgagcatatcaccttctcggagcccaatcacaccgaatggaccatgtcgctaggatctcccagcaaaactcccagaatgacgagtccgacgttgaagctgggtatggacccttgtacgccgttgcgatcttccgtgtcagcagggacttagatggccaacaggcctatatgctcgtctacctacaagttccccatcaaggaaccgagttcttcccacctaatgagcgagctaagcaggccgctgctagaggccactgcgaagtcgaagctatcaaggccttccacaaacaatattcgactattacacctgctctccttggaataaaagaggatgtccaggaccaacaaggggttatcccggggggcttcgccatccactttgtcttccaacgtgtcccaggatatcgtctctgggaagatcatgttatgcctaaacatagagcccagcctcatagattctttacagatttcaccgttcccgagcgagatcagattagagaatcgtttaataaagggtatcgcgagctgaataagctgggatgggtgccctactatccctcggcaactaaattgatctgggaccccattgcctcgaaattgtgagtctttttcatcgtgagcctaggttaggcttgtggctgattattgaattaggtactttgttgactttagagatgttcactaggcaggttctcacgatgaggatgttgttcctgatggcaacgataccctagaaccgaaagagatggccccgattgtacgttgggggatttggggcctcaccattccccctgataagcggcaagaacgagcagatctttctaagtggacgctctagccctgaagtactttgctgcctatgcgacgatgtagctcttgagtctttacaattccaatctttttcatatgtatcggagataatcacaatattacctcctacatagccaagtgattgctgttttatagctatcttcggggtttcttttccatttcaatgttagtgagcgggtcatggtgttcttgaagctggaagtcggcgagtttaatatattcacgtgaccgggcttggccccgacgttggttgcgacttggtttgcgctccgatctcttttttcccgagtttcttaatattgcgatatctcaaggtcttgcctagatagttttccaagctgtcccgctggaactactcttgtccgtgtccgcgctgtttcccgaagaatctgcactcccgcgctcaaattgttaccccgccggcggatcaacagctatgggtcgtgaagaccagattgaggagcgtgaagtgctcgattcaatcttccccgatgaaattagcggtaagtaatagacgaggcgcctagacggtttaaactttctttttatccttgctcacagcgagacctggcacctagacatatccgaaacctcgtaccgagtatccataactcttgatgccctcgaatatgacggcgatgaaacagaacaacctgtgatatgcctggaggtctcttacccggaggaataccccgatgttggcccgaatctcagcatctcgtcaccacccaatgcttcgaagcatcctcggctagatgtccaggaagaccgggacctactgatggagtctcttcagcccactatcgaggagaacttgggtatgccgatgatatttacactagtcagcgcacttaaggaaagcgcagagcttcttatgtccgagcgagcagacgccattcaagccgagatggaccaagtcgctgcgaagagagaggaggaggagaacagaaaattcaatggcacagcagtcactgtcaagtcattcttggagtggagtgccaagttcaaaaaggagcaggaggaggaggagcttcgcgtacgcgaagaaaaggaatcggaagacaagaagaaaaagcccacgaaagaggagaaaaaactcacaggccgacaattgtgggagaggggcttggtaaagggcgactatgatgaggaaggtgatgatgctctaccggctgttgagaagctcagtgtggccgcatgagctgatacatagaaatgttaatgacctgccattacttcatgaaattatgtattataacctttttgaattggtgtgattatactgagcgatcagtgaactagtatcaagggcaggcggagtaatatacagatctgcaagtccacatggacttacgttatggtacagggaaagataatgcccaatcagcagacaaaagaggagtggaagagatatattgtcgtggtttgagctgcttgctatagcccatggttcccattgatcggatatgatcaagaaacctggctaggttggcatggataatgtaacattcctttacaacaaacctttgtattctgatctcgggcgacattgacaagggcatggccatggataggcgactctgatgtggtcaggaatggacctagaatggccatatggttgaccaacatccgtctgcccaaagagctatgggaatgtaatttgggatagcgcggcaagacggaccactcagtctcattactttggctgcttttggctagcttcttcttctgccaaagccctttcagctagaacaatcttccacaggttatctgcaagctctttagattgcatgtcgaagtgtccgattttcgcattgacatcggcaatggcatttgcaggatgttcagaccaagtggatggctccttagtgttggtgacgcgatcccactcctcttcgtcctcggcgaaaagtagctctactttcagtctgtcacgacgttcaatccagttccaacgacgtgtaagttttgttcgtatcacactgctaacgtttctcggttgcggttttttaaagcgcaagaacggaagtccgcgtgcattgacaagtacagggacattgcgcttcttgtcacctaatggctggggtctgtttaggaccgagccggcgttcggatgtcgctgatttgtttcctcctggaagcgaatagacttttcttttcgggctttcttgggcgtaagaggtttgacagatggcgctactagtcgaatcttcctttgcatcgcagcatatttatctttttgtgacctagcttgtgctataagagttgtgatccgctgtgcatcatgttggttggtatgggacgaagagaggagatctagagcctatcatatgaaatatcaacatgagctcaaccaagatgaatattcgatgaacatacctcatagcctgccttcaaggcatttgctgtttgtgatgggctttgtaattttttatattttcggaaattctgccgaaccagcggtttggtctcacccagccacggattgtctgcagttagaggtcgacattgtcggagaagtgctcgatagagtgccaaacctatcagagacagactgtcagctggaagtgcgggaaacgtagggaaatatctctcacaagcaaaacgatgagctccgttatacttgggcaccagcactttatgcattctgccgtgttgaaggttatactaataatgaagctaaagctaagtcttatctcatttctaccggccatcaccgcctgctgtaatgagctagcagaccagattaactaataggtactgcccaagacacataccgccttgaaccaaaggcacgtgaccaaaattgggtatatatacccgcccgcgcccccagaatctcttcttcttttctttcttcttcagctctctttgcctattggcttagatcaagtgtagtatctgttcttttcagtttaatctctgaaagtttccgtccaggaaacactttgattattcctatttttggatctcgcgacttggcccctgtgcttgcacatgcctcgttgcacagtgtcattgggcttacactacccccgatcgacgcgaacacctttttcatcaactgctcggcttgtccgggcgcttggagaagaagatcatgtagaggtaaatactattctcttgggcctaggacagtgtcccctcggagttgtttgtctggcgtcgccctgtctacccccatgttgtgccttttcatttttttggcatttggctcttggatcatcttatcctgcctccttcctgaagccccaggtttttttgacctctcttcgacctttagtctaagcgttcgtccccttgaatccctcgatccctttgtcctgtccccatgtttggtctaatgttccccgaccctaagttgcttcatgctagatagctaggaatcacgcatggaaataaaatgaatcatttctatgtcattccataaatgaagtaatagtagttagttattcatttttttatagttatcggtgcgcctgacgcaatgcccagtccagtttcacgaaaaaaacactttagagatgaagacctaatgtagggatgaaaattgaaagttggggcccaaaataacccctgccgatgctttcatgcagagactgtacacgctctagggtcatagaagaagagaagaagccaggaaatttaaatgaagcccaccgtcacatatgctggactagaaagtcgagccctccgggggctgcggcagcttcttatgctggggcaaggccatgtacctggactaagtgtcaacaccaactatcgcatcctctacaattctttgtgctcaccttcttaactcaatcagaaccgtctccatagtgttgtctcgtttccactgcgcaagggtaggaagctttgtcggatcgacctgtagtacaatcacttagtacataatggcttcgtgttttggtacccactctcctcataccttgccagagctgggatcaacacaggggatgttgactcgagaaacgaattgaacggtaggcgggttatcggggtagtcaggtccgcagtggatgttcacactgtatatccggttctcatggacgctctaaaagcggcagattagcgatagtttaatggtggaatggagaagacccagaaactaacgtgaggcggaccaaggatggttccattccagttgctcatcatcatatcctccccatcagcaagtccgtatgagcaggcatctaataataagaaagatacgtcagtgatctaagatcggacattatcggggatcgtaggacaatcgtacctgcactcagacccttctcgcccttctcgagctcctccagaaggcgaaagtttcttgggaccttggcggccatgttgaacaccgagtagtggtttcggaggctggaaatatcacgacaagtgtgaacagatgccaaagagggatgttgcgacaagaggggcaatgcgctgggcggtcaagtgggatcatgatcacgtgcgatatggcttatcggtggcttggcacctgttggagatgccacgccttgttgatcccatcgtggaatcgttgtactagcagaattgcagtcgttgttcccttgctgctcacatgaacttggaattaaagctcaaagtttgccactagtctggtgtaggaacaccgatctgttcatctgcaatcgagagctccctatactgttgacgtcgggagtgctggccatgctttgatgcaacaaacctatatcagaaatgtcctcccaattcttgcagacggagctcgccaatttgatacatgagtctcgaaggaaaaactccgatttgcgaaatgttggttatcactctctaggcgtcatcggccatggcacactaacgagaaactaacaggccgctgaacaatcattgaatgagctcaaagcactgccctcaacttcagaggctcagatagcagcaggtaattttctatatggcaaccatttgtcagttttcaaccgctaaaacggcattagatcttgttcgcaaaccgaatttcgtcgagccattcatcattgcatgctatactcggcatgcgaagcttgccggtattggtgtgatctgtttacagagactaattgcatctcggtcattaccctcgagccgtttgaaggatgttctcgggggcctgaaggagacaacgagcttgagtaaatgaccaaataaatcaaagcctctaaattgcgctaacgctttctaggtcttgatatccaactgaagattctacaatctctgccttcgcttttgcaattttattccaatgaattgagcggggagcttcttgcgaatacgttggaaatatgcgccacattacaggcaagcaaaacgattgcagtctctagtactgccgcggctactctccaacagctggtggtatcgacctttgaaagagtttcgagcgaagacagccttccgaaggatgtcaaaatcaccacaaccatcaaagtcgatggtcagtcgctcgacatcggctacttcgcctatgatgcactgcaagtattggatgatctctgtcgtctgattgatggtgagccactacagtttctgcgaacacgaaccctacccccgacctttgtactcgaacttatcgagagtattctcttgaacagcggccgtctttttgtgggacatcccgaactttcgcaagtgctgcgcgttcggttgttaccactagccgtccgttgtctatctgagaggtattcattcgctcaaaccgtccgagtcgctcgaattcttctcattcttctgaagcgtcatatgtctctcttgcccacagaatgtgagatggcattgagtctgataacccatctcgttgaaccggatgggacagcgccttggaagagactactctgcatggaaatcttccgagggctatactcggagccgggtactgtgcggctgatctacactttgtatgacagtgaggaaggcagaaagaacatccttcgtgaccacatggcggcacttgttcggctagcttcggagaagccttcgttgattggtgtcagtaatcaatcaacggtaccttcacgtgcagagcactcaagatcaaccacagaggatcagataactcttgaaactggcggtgttgctggtgtcattggatcaactgttcctccaagtgaaaccaaggtgcctggaattagcactcagtggagtgttgttcgtacgccatatatcgatctcctcgacaagacggaaccgcccacaccgccggacacttacatttacagcctggtccttaattgtatcagcagctttgctgaagggctcgcgaaattcattcttccattaacggtcccggatctcaagcaaagacgcaagaatcgacttatgagccccgttcagggacccgactccgctagatcttctcaagattttccagcagaacccatgcgagcgcagtctagctcgtcatcgaaaaaatcacatgttcccatcaatcctctggacctgcagtctcatgtacagtactccgccatcaagacttgcgcggggataatagagaactgttggcctgctgtcctagcagcttgttccacctttttgcgcgcatctttagatgacgagtattaccataatcttgttcgagcattccaaaagctagctcatgtggcgggtcttctgagattatccgttccccgagatgctttcttaacaactcttggaaaggctgctacgcctgtgagtggtgccaagtcacacaatgtgtctgccaccggctcccagcaaagtgacacaccccaaaagaaacggagaagtgcggatctgtcaagtctggccagttctttatcactggagcctactgcggtggaaggtcctcctgtgtctttaagtacgagaaacctactttgtatgcgggctttgcttaacctcggaattgctttggggccgacattggatcagccggcctggtctattatttttgaaacacttcaatatactggactggtgattggcatgtcctcaagtgcaatggtcaaatcggctagcggtaccggggagaccccagtcaccccaggaaacgatgttccaactgccaatcttgggactgaggtgattgcggttcaggcggcttctaacaaaatgctcgaaagcaccagcgatttcccaagtgcatcttttgaagaaatattacttgccttgttgaatctgtcagcattcaccgaacagtgtcgcaacatgaatgatgccccaggagtatcagacatacctcgaacaccgcaatcaccccaggcaggtggacgcttgcaccaaggttcccggcgcgtatcgcatactgtcggaaaatcaagaatgcaagacgaggaactcaaatttgtattggagaaagcaaatgaactagccaaggcaaatcttgggagactgtcttcgctcgagaaagatgacagcaaagcatgggggctactgacgcaaagtctcatctctacttccgcaaatactaccgtcagtccgaatcttcgcctgcaggcaagcgcgattttgaactcgatcgtattctcaacaatgaaacaaagggacgaagacgatgagaaagtctacaatcaagtgcagacgaggaatctgcagacattgaaagcccaggtcgcctcgctctatgcatcggacatgcacacgtccaagtctttgccaataaccgtcattgaaatccacgaacagaccttggaagtgttaaataatattctggaacagtatgcagaaactttcgtggacggatggaacctcatctttgatttaatatctggtgtttttcaacatgccccagatcctggacctggcgatcggccttctactctgatagagcgcagatcatcggctcttccagcaggcccccggttggtacgtgctgcctataagtctttgcatcttgtcgcatccgacttcctttctctgctaccagcgccctgtctcttaagcttggtgaatgccttctctagctttacgtcgcaaacccaagatttcaatatctccctcaccaccacctcgtttttctggaacgtttcggactttctccaggcccaaattgagcaaatctcagttgaccatgttgatgcgtctgtcagcgaagaagaactagctaaactagcacataaccaagacccttctgtttcccggaactcgctgtggctgctgctgctgcttcgcatcgttgatatcacgacagacagtcgacctgagattcgaaacagtgcagtccatacgcttctacgcatcttcgacgcctatgggcagcagctctcccccggggcgtggcgtctgtgcctaaacatggttctcttcaagatggctgagggaattgagacccctctcctccaagcgaagaacaaccgaagcagtacaaaacctgatgacttcaaggcgtgggtggatacaacagtggtgatgatcaagggtttatcaactctgatcaagaatttcttcgagacccttgtgcacgacgagaagttcgatcaatcctggaagcgacttttgaagtacctgcaaagtctgattgacttgcatattttggatttcagcgaagcaacattttctagcctctctgcgatcctcctccgggtgcagaatggatgtgaacttagcaacgatgctcttgagtgtgcgtggcttctatgggcaaatggccaccctgctagcgacgagaaggcgcttgacttagatcaacctaaccaggacgcggctttggcttatctacatacattccaacagatctatcgtctttacaaagatcagttgagtacgggacacattgaaaacgtccttcatcatctcagtttgctggtgtggaactcggtctccccgcgctactctccagatattgatcgaccctcggccttgcaagcgctagtcattgattgtatcaaaacgctctgcctggagaaagaggactcccagccgaatattctcttgtgtcttgccgaattatccgattcagcattatccaagtggagccccggcagcgacactcgaagaccaggattcgtggccttctcgaaacgcactatcgatcttgtcagctggtacattgccgaattcggcatcaagcaaaacgtcttcatgaatggtgctcttgcaaaatcactcgaacacctcagtactctaattgcggaaaagtacacatggcaagggaaggatcgcgagccgttcctatggcaaaaggccacaacagtatctctgaacgttctgcaagtcgctgtcccctacgtggaaaagcaatacacgaaggcaaacgagtccgaaacatctcagttctggcaacatattgttagcattacaaacggaattgtttccgcccgtggcttccaaacccaacaactccccaacgcccgaatcctcacagacgaagcattcgacatcaaagccttcacccgcctgaagaccctcatcctcccatccctcggcgcagcagcaatcccggacgccgtccgccgcgatttcgcccgcgctctcttcaactcctccttcatctacgctcccctccgcttcgacctacccaccggcctcgaagacgcacccctacaggacttctataccgtccgccccggccgcaccttcgacccaccgccgaccctgcgcccgggaatagcctatgtccttatagacacgctcttcgagctcgccgcacactcgcaagccgagaccgagacaaaagccgacgctccatccccgcagactctgctcgcccgctcgatctcgccctatctccttctgcgctgcgcggtctcgctcaagtcttacattgcagaccagcctttgcgtggcttgatgccccaacccacgcctgcccgcaaggccctgctccatctgctcatccgcatggtcgagctgaagagtgagccgtcggctatcccggatccgccttcgctgaagaccatctcgggtatctcgggtgaggatccggaggagcatcactatcggaagcatctcgagtggatttatccgttggttgtgcgcgctgtgcaggttgctggcaaggagcgcgatgatgggcagattctccaggcgctggggaaggtgttgcaggaaattggtcggtttgagtattagagctaatctggctgggtgtgtaccatgtaggcgattaatgcattgttttattttatactctagacttcacattctctcggaccaacacatcagaagtggtcacattctacaacctgaatctaagatgaggttcgatttggaatgaggcttggcacaagtgtaggcagagtaaggtatactacaaagtgatatcgtgacatagccgtgagacaggatcaacggacacaaaaggaatagtgagtagtagagtaaggaaaaatcgagatcagagacaagaggcgggtatagaagaacagatccgcaggtaccaagagactgtaagaaagaagcgagcgataatgagaatagaataggatagtctatgctgctggcgcgggaacaggctgaggctcctgccgaagcgacggggtgacttctctgccgggcccagcggtagcagagcccggtggaagagcgggctgctgacgctgttgctcgaggagcatctgctgttggatctgctgctgctgtgcgatctgggcgttcggggcgatctcgggagcttggcggtagagcgcgatctcggattgtttgaagtagcggcgggcgtctgttgttgggttagttttgagattggcattgaggtgtaggccaatggtgtgtcaggaatgggaggagcgtatggtaaattgtatcggtggggttgccaggaccagaagtggtttagcgtgggggtatcgggttttgaggggcaaatcggcaacaaaattgacgcaactcgggccgacttggatagttgtattgggtaacttcaattgccgacggctattgcattccgtctctacaccccgcattctgggatgcgtcatggactgatttgaggattgccaagaacgggggaaagaaggaagaaagaataggtaattagagcgtaccttcgtcgatcagtacgagactgagatagtaccttgtcgagtacttcttgttaacgtcgcggaatgtcggcgtcaagtcaaatccaccaaggaatagacggattggaatagtttcacctgtgaaaagttagtcatgctcaagattaccccaaacttcccaactctcgcgggaataataaagccgcagagtggtggccgtggccaggcccagatatttcaggggtgttcactaacctctcgatggagagccgtccataatctgcgctcatgttagcattcttatggctcgtatttcatagccgatatcacttcgagtacgttcaacaaatcacatacctcaaagcgcaccaatgtctcactctcattatattggtttggcggggatccagttgtctctcgccgaatgatagacaattccatatgcttgatcttgagccgcacgagcaagaaatagatacggccgacaatcacatccttgagatgatacttggatttggagtattcgaattcgatatgcaggcagtcctcaataccgacgtccatcttgatagggctgttgttctcaggtggcatgcggtacgagtacacccacaagtccttctcccgaatgacgtccgccatgcgccgtgagacagtcacccggacaaagtagcgcagcttaacgttgatgccattgtaggactcgtattgcttttcgacgttcttgaaattgaaggggaaggtctgcgggtggaggagctcgccgggcgcagcgagttcttggaccagggaaaggaattcatagtggttgcctcggtcgtagaacatctctgtattccaaatggaaaggtgttagcgttcagcctgcgatggcgaattcaggagaggctggtaggttcgacgcaccaatcgtgccaataaattggaccttgatccccgtgtgttccagtcgcttgccatccttcggtctgatagtcacggcacccttgacggactcgccgtccatgtacagagggacccgctcgcggcggcctttgtcgagcttgacatcgacggtctggcgctcatcgagatcttcgaggaccacatcgatgtcgaccggggtggagaagaagagtgaagccatggtggaggtaattgaggctgcagctatcgaggcccgaaccaataagtcggagctttgatgatctggagcttgtcgcggtggcctggaggtagcttacgtaataccgcctccccgcgccgcccccatgaactgatattcgacatgtttttgtatagaactggtgattggagtataagatctgaatgaatacctatatacgatatttgatactcttttaatctcgagctccacttgatctccccgggtctacttctggacctgactaccaaaggttataccactgatctacaactgtccgttgtaacttggactcttcaggcatgtcggatccactggcctcccaacattcccatttcccattcccaccgattggacctgaagcggtcttcgctgtcttttgaacatccaagcacacaacttagccatacggatcagaacagcacaccttctaagccacgtcgaataagcaggagatcggatatgtcggaatccgcttcccgtcagtcagcttgctctcatgaccatagacaaaacaatcggaaaatcagtgaatagccaagcaaggatccgactcgttgaccccgccggaagctgcatgccttcttccccggattctgagggaaagtaatggcctggtcatgcttaccgggcataccaggcttacctgggtatagtcggtgtgactgttggaatcaccatgcatattatttgctcatgttttcgtgtcctatcggacgaggatatattctccggaatgtctcccctgtgttccacgggattgagaatcggcaatccgtgtatgatctttcaagatcgggtggatctgcgaatctggaagaatgtggggggccgtttctctgtcgatttactgtcgacttcctgtcgacttataggaagtgagagataaagaatcttgaaatgacgcaggtacggaatcttagcgagaaggcaaagttccacccaaagtcagagaggagtagaaactcgataggagaagaactatccaatctggcggctttctagcgtgggggtgagttactgtaataccaataccgaataccgtgacatcatgatatttaggtgtttgatggtgtagtcaattgatagttatagcgaagtataagcagagaagacataatcttacattctagaagcaatggctattcgcttttggatatagtcagaagaagacaccccaattagcctaatatccctcatgtcctatccctatactatccctattctccccctatcctgaaccccaaatataaaggaccaataaccgtacgaatgtcgtctcccccactcggcttctgcttgaatcttttcttacccgacccaccgtgatacaatataagtacttagaacaggctctttgatttctgaaattttatttcagatctgaaagacctgttatagaacacttttcccgggtatcactacagcgtcatatctccacctcgacccaagttattacactggaaatccaaatacatccctaaaacgaacagcactttcctttcctctacaacatgctctccgcaggagaacgaccacagcctccccaagctcccgccatagtagattccaccgcaagcaaggcgcgcatcatgccggacctcgccaacggcaccaacggaaccaacggagtgacgtccactacgccctccaaacccgcgaaacagcaacatatctgggtcgtgaccggtccagcagggtgcggaaaaagcaccgtgggcaacgtcctacgcaaggagcttggtattccatttctagaaggcgacgacgtaagtacccaagtacctgaatgcaccacaccctacactccacacacccacaaaccacccaattgcacccaaacccaacaatcacccaagtatacacaaataactaacacaaccctcagtaccaccccgcagccaacaaagaaaaaatgggcgaaggcatcccactcacagacgaagaccgctgggactggctgatctccctgcgccaagccgcaatcgacgtgctctccccttcgaaagccaacaacttccacccacccgacggcgtggtagtagcgtgctccgcgctgaagcagaagtaccgggatgtgatgcgcgttgctgcgtacggctcgccctcggtgcatattcacttcatctacctcaagctcaaggaggatgtgctgatggagcgcgtcgcccatcgcgaatcacactacatgaagagtggtatggtacactcgcagctggcggttcttgaggagcccaaggacgagtgggatgctattactatcaatgttgagggcacgatggaggaggtgcagcagaatgttattcatgctgttactgataagcttgctgagtataaatgattgtttctctctctctccctctccccctctctctatcgttggattgaagggagtgaattcatttgtgtacttggtggttcgtgcgaaaatgggtatgatctatgcatggaggatttagcattgtgtttctgtcgatttttgtgcctccacaatggtgtttggtgttttggccggcttggctatgtcaccggtctgttttagatctggagttcttgatgaagctcgcatctcgggtttttatttcctgctgtttgatatatcaattgtctgcttggcaggcttcgtgatatcctttgatcaattgctctgtctttatcttttacatctcagtgtctctatacaatgtactaagaagctcaatctataagtattgaagccagcaactagataaaccaagtatgcagtgtctttagatatacccgtaatttgttattatttagatataacgaactactttgtcaagactcgtctaattcacctgagatttagaagcataagctcgggcgactcaaccaggtccttaaccctgttacccattttggccattgtcgcaccgtcaatgacgcggtgatccgcgctccaactgaagttaaccatatctccgcgtgtcacctgtccatcgtcatcaaagacgggcacagctctagtcctacccacgccgagaatagccacctccgttggcacaagcaccggagctacgtatgtgcctccaatattgccgatgttcgacacggtgatcgtgccaccactgagatcagcggggctcagctttccgctcttcccaagggcactcagccgcgcgatctcagcagcaatgtcgaagatcgagcgactggcgacgtccttgatattcggaacaatcagaccattcggtgtatccatagcaattccgatattgtgcttggcgcgcatgactagcttcggctttgcggggtccgtggtatcgactttggagttgagaattgggaactcggtcagagcctgtgagacggccttgacgacgaaagggaggaaagtgattttggtaggatcgtgtttgtcaaaggcaattttcttgcggatggcattgatgccgttgattttgagttcgtctgcgtaaagaaagtgtggaatgttcagggatttggtcattgttttgaacatctgtgattggatcggagtcaggttgacaattgactctgcttgccgtgtgtccggtgacacggagactgaggtgggcactgatgttggaagcgctggagaatctctctctgctacaaacttcagtacatcttctttcatcacccgcccgtcttttccggttccgttgatttcgaggatgttcacgccgtggcttttcaatagcccacgtactgcgggaactgcaagggatgcatgcttcgttttgggtatctcatcaggagctttgatagggggagaggttattagagaggattcgactgcttgagttgcagcttggatctcagaggccggggtaggttcagacggcgctgcccttgattcgtgcgccgggttatcatcggggtattttccatccgcaacctcgatgtcgcagagtgcctatcgaagcctgttagtacgttgactgcagtctgactttcagacaagcaagagtgaaggtagtacatacccttcccgtaggtactgtatcgtctgtctcgaagtgtagtttcttgattacaccctcatatctcgatgtaatctgggtttgttagtcgttaacccatagcagggaacgaaggaggcagcacccacatcatcgacagctttatccgactggtattggcacaaaggtttccattcctcaatatgagccccttcttctacgtaccattgaatgatctggacctcagtgatgcctggtaattgtaagtgaacaaattgaggaatgagttaggattatgaataaattaccctcgccgacgtccttgagaacttgtgatttgatctgccatagcagagagctggcatggaattttcgggacaagagcggaggtagggtggagcgaatgcggaggtgattctggggtagacaaggtctgaagttgcgggcagcaagtcccccactgcggctgaaacccattgtaaaaagggaacgtggtagagacagattcaagagaagttttctgaaattcctgaagagaaaaggagcattgtgtctattttatttggcattcgacactcgattgttctgcccgcacgccgacgctaaccgacgctacccacgtgatctccccgcatctatgcaagtatgggggaagtatggcattggcgttatctcatttctttgtatcttttcaaattgctagaaaactcttgttgcttggctctattgtgaagtaccaactcggaattgtcaagcaagtgaatatcactcaggttatatatggacagctaggcaatataagacgaagtagaccaagcaatctaccccagaaggcaattatatacgattagtagagagatttggagtaaatccatatggtacaaatgatggaattcagtctatttgactatagttaggtatagtaagccaaaatcctccctggatggctgagtgggtgagagacacgaggtcatctgtttgctgggtgaaacattgatcacgggtgataccgcattgggaaactcagcaatggtgaaactggtcagggtttcgatcctcgccaggagtagttggggtacggattctttttatatttttcttctttccttgtggtcgacagaccagcccaatacgagggtagcaccttccccatagggcaccttccaatgcccttacttgatatattgacatattggtttaggtatccatgggcaatgatgcaggtgatgctatctccgagatccactgctgtctatctcatgcaggtacggacattgggagttccaccgcagctttcagactccaccgaggatgttaccactctacccaaaattgagcttggagaaatataagattgctaacactgctatttggtttccaggccatgcttggcgggaaaacacaagggtgtacctagggaactaggtatctatcacgattgcaatgattcaacttgccctgtgagtcacccagatctggggtcgggtctcagccacaagcacgcccattcgtaatactctactaccggaagttctacttctgcaataaacaaggatatctcggagcttgcccgacttatgtccgcgtgtcaaatgtggagacgacatcaagatgatcgtcacaaccttaactcaatgcagaatccgaggccgacgctgcaaggtccgaaattcactagaccagacaccgaggcagtcaacgtggtacgtttattgcatgaaacgtttaattagttaataggtacgtacgtcaattgtgccgatcaagatgattacctaggtataagaacatcgtcggtcccccaactcctagtcttgtgcttcggaattccaattgcttcaatcttctgttttgcggtgatcccattatggctctcctgaccaagactctggtctcactggccttgggtgctgctgtcgcccaagctcagctttgggacaaggtcatccaaacctcttacggtcccgtcgaagggttccagtacttcaaccagtccaccctggataagtacttcgatggcgccgagtccaacgtcgccgctttcttgggtattcctttcgctgccgatacgggatatcagaaccggtggaaggcaccgcagccccgcgagtcatggaacaagaccttgaaggctacggactttggccctgcctgtcctagtaactcggcttccaatattagcgaagactgtctcagtctcaacatatggaccaacgcggagaccgctgatgccaaacttcctgtcatggtctggaaccaaggttccgacgaaaccagcaacaatgcgtggtactacggtggaggcatggccttgaagaatgtcattctcatcaccttcaaccgccgtgacgatgcattcggctatcttgctgcccctgagctcaatgaagagggctacaagctcactggccataagacctctggtaactatggtatcttggatcaattggaagttctcaaatgggtgcagaagaatattgccaaatttggtggtgatcctgaccgcgtcactcttgctggtcaatctttcggctcttctcaggtctatcatgcagtcaatagccctctcttcacaggctacttccatggtggtatctcccagtccgggatcagatacccctacgataccatgctggctggcctcgccacctcatacgtcaacatgtctacggctatctccaatagcgctagctacatcaaggctcacaacgtttctacaattgaggagatgcgcacgctctccatggagagcttgttggttggttcttcggaccgcgttaccaacagctccatttggtgggtcaccgcactctccgccggttatcctctgatcttcaagcccgttctagacgactacgtgctcccatccaagtacattgaaacccttatcaatggccctgccaacgatgtccccgtgatcactggtaataccaaggacgaatctggtgcctctcccagtaccgactatactgttgccgagtacgagtactactgcggactcaagtacggaaacctatctagcaaatacttcaagctctacccagaccacaacaacggtaccattgcctctcgggcctggaacgctgctgcccgtgatctctctcttatcggctcttgggcctacgccactgcctggtacaagtctgccactgcgaacttctacacctactactggacccatgctcccccaagccaggaccaaggtgccttccaccaatctgagatcatgtatgcgctcggggctctgtacgccaattccgatacgtacgctttcaccgagatcgactttgagatccaggagaagatgtcgtcctactgggccaattttgcgaagactctcaaccccaacaatggtggctcctacaatggtagcaaatcgttgccgcattggagccccaacagtgccgagggtacccgggttgtcatggaactcggtaaccagtttgaaaatgtgcctattgcgaagccaaagcaggtggaattcatgatggactacttccaccagcaggttccctactagagagtctccctttagagtgacaagctctctagcaaacattagcccagtggttcaatgaatacctacatttacgtatgtagatatgtagtctatgtacactatgtttattgatgaagctagatccacggtatgcgtacaccgtaccaaggttattaagtcaatgacctcaatcagaataacccggagaatattggcaatattgaaccttcctctcattgtatacgatcccagacataatggcttcaatccaggtaaatgaaataagtgcgtacaatatataattgtgcggagtaagcctaggtatttcctaggtaactaactgaagtaccatattcatggaagatgccatagatgttcatgtcctgtccgcattagctagagccccctgagggccataataatactcacgtaagaacgataaacgcaagacctaacatagacacgaagccaagcttctttttcagctccccttggtgaccagatgggttgtccgagaaggaattttggaaaatactttgtgattccatgacctcctattctgtgatagctcttgaccacagtgcaaaggcagagagatcgtctgcaacaatatttacaagagagattcattccaagagagattccttgagcaagtaacggctcttgattttgggccgagttatgagatattgccaccgggtcaatagcctattcctcaaatgataaaccagccgtgacttcaagcacccttggttgcgatatgctttagtttgatcccagcaccttggggcaggcgaactgctgggaccaaccaggacggtttacaaggtatccatctatgcctccttttggtgtgtgtttgtggtgtacataacgctaggccgtagttagtttgactcggcccaagaaaattacgaaataggactgcttttgtcaatctccactccaaagttctccatcattagaacaaccaaagcaaaaacagggggagtaaattaccgagagcagagataaccgaatttcggcgaagcaagcgatagtggattcgacccaccctagagataggagttatctcgcggagaattgctcacccccgcatagaacttctactcccgaggtcgtcgaattcgccatggtatactttgaacgcgctatcttgtactgtgaggatcattgatgctactctcatagattacccgtgtgacatacagctttgatgtctcctcgacgtccctggtctaaatcggaagacgaaaaattgatcaagctcatcgggcagtttggggaccaacggggcagaaacagcaaatggcaagagatctccagaaatttacccgggagaacgaataaggtaggtcctcttcttttatgcatcgggctggcgtgccagagcatcgctgatatcaccatattcacaaggattgtcggaagcgttggtttcattctttagatccttctcttcgcaaaggacgctggacaaaggatgaagataggctcttgcttgatgcctatcaacgaattgggcctgcttggaaggatataggcaagtttttttctatccaatactcttacatgtccggcggctaagtgtacctctagcacttctcatcaaaggacgaaaggatgatcaatgtgcgaaaagatacaatgacatccttaatccccaagtgcaaaatcgtctcaaagtctggacacccgaggaagatcaatatttggcggccaaagtgaaacaactgggtcataaatggactgtcattgcagcaggcctacctggtcgtcctccgctgacctgccggaatcgatggagaaaactggccagaaatatctgtagtgacattggtttctctcaggaaaattcgccaatgccccaatcctctacggagaattcaaggacttcgccgtcgtctcagaactccgagatcttcatttcgtctcctgacgcatcgtctgaccccaccactatcgacctcctagatgccagagaggcatctaccgctctgccttctgattcttcccttttagatcttaccatgaatcagttagattggattgactgccttctttcaacccccacgaatatgtttctgagcccacaaccatctctacaatcacactatcaagttcctgggattacagatccttcattcacacccgcgaatgacaggtctccagatccacaaacagtcttgggaaatactctcgacggcgattctacagtcatacatcaagcctgtggcagcgcacatcaaatacatccgcctctgactcattccatgccaagcagcgaattagaggaagcctctgttcagcaagcaatatcttcatttattcaggacccaacttcagaaatgcataatcctgctgctggcagtatgcaacaccaggagcaccaccatattcatcatgttcatattcatcatcatcatcactatcatcaccattaaaacttttttgaatggtcaatctcagccatgatcaaacgtaaccttattgcatgaatcaagtgctcaattgcatttagctcttcatacctaagtctctcttatatatgaaaagcatggaatatacctgctcttgagaagcactttgtttctaggtgaggaaatggtaatattaactgatgaatgcagcccatcggggaagttgatgctacacaaagtctatttatgcagtcagaatttagtgtaactcgtcgatatttttttattggcttgagcagctcaggattctaccaacaggttaaagcagaaagttgtaatgtagtataaccatctacagaatgaagacgagaaagttaccaaaatcaaagatgatgaagtgtaggattgatggaaggtgaagatctagctactgtcatgaagctctctatatagctccatgctacaaagccgcaagatctcatcctctagcaaccagaagaagcatctctgcaggctcatataaagccaataccaacacagcaagctatctacagaggagtgaaagaaagggaaaggaatgccaaagaaaggtctaaaactgcatagtgcgatggtgagcttgtccaactgcgtcaagttgccggaaagaaattcaacaaaacagataattgcagagcgaagcgtcctcttctattgaaatcgaaaggaagatagtggacaaagtatcataaatggcttttgcagcaatcagtggccttgttttgttcttgagtctgagctggcgacaaggactgagtcggcgcttgataagcgacactctggttggccaactgattcgaaggcggcacgtcgttggtggggttgtatagggcaaagttgtagggcttaagatgcacctgagcgatttcagctggcatgatggggaagtcctcaacacgagggttatgcgtgaacccgaaagtatgccatatgacaatgtcctcatttcgcacactatcacgggcctcaagccacgacttgatgccggtacccccaagtgattggttggtgtaatcaccggccgggaatagctgccgatccttgtacttggtaacccagatggaatgctcacagaactcagatcggcgccagtgccagctaccgggtctggctagaagtaactagagtaagatcctaattagtagtcatagatatttaaagctgtccagtatcaaacttacctgagaccgaataggaacgagtttatatccgatcggggtcaatgagatcgggttctgcagtccttcatttaggatcttgaatactctacccttggaaaagtcgtcttcaacagggccagcacgatccagaatcttctcctcagtgacgtagcccgtaccaagagggttcaggtcatcgtcccacgggatcggaacagagtcagtcgacgcaaaactgttcgaatgacccccaacagcaggatcgatacgaatgttgaacaagtgttgatggtaaggagccatgacaccatcagcgacgcgagtgccccacgggacctttgcatccttatcaatcggctgagtagatagaattccagtggcgcgggtctcgaaggtgatttctccagactgatcaaaataccacatgtagatatattcgtagttggcgacggtaatgatagtctgcaggaccaactgacgcttccgcaccaccgtggcttttcctgtgcggtggttcgtgtgcttccactgaattccattgtcgatttcgtgcaagcagatagaattgggccgaagggcaggactgccatcagcagccacaacacagccatcgaaatacttgatcacgccgaggcagtcgcagccaagttgtagattgtttgccgtgacaccagcacccacattgccgagatcgaaagcgcccttgcggtagataggatttcgagggtcaccgtacggaacaaacatctctgaaagcgaaagccgatagaaggcgctcttgccatcaaatgagagatcgtgaagggttaagccttcacgccagttgaaacccacgcggaaacgccatttttcccactcgacaagctggcccatgacagtaaacgaagcaccttcgggttgcaagacctggtaaggcttcagggttgtacgaggagggttcttctgcaatcggtggtcgtattcgggctcgacgggttgggtacgacggtgtggaacagatgagccgacgggagtcgcggcttgatcacttcctagtggcagacggacgatcttctcgacttgcatagtgcagagattcacaatcaccatgaaatccaaagggaaacagtagtggtttgaatccggatcattgttctcggggtttcgcatgtacatgaaaacctaacgcggattgttgagtcaaaaaaagcttttgttgagactatagaccctgtcaaaacttacctgagtatggcgagtctgggtatcctcgccatcaactccatagtcccagggatcgaggaccacagtggtgtcgtcgatcttgagtctttggatttccgctttcacgcgtggatcggccatggtgacttgggcagcctcgttcatctcggatctgtcaacaggtccatggaagtctcgcgggagctcaacatgatgaacaaactgcttgttggtgacatcgacaatggcctcgaaaaggcgaggagatctcttgatataccagatgaggaatatgcaacgaggaatcgctgggagtggctgactgttgtgctcggcctccaaaaacttgacaagtatatccttcggtggctcttcgaggcctgcagccttgaagtgcagatctacaccttggtagctgcctttgaccaagtccgtagcaagttgaatctcttcgggaagagcggggtcaaggggatgagtggccatgatgacgaacaagcagagaatcgaagaaagaaaggttgaatggctgcagtgggtagaggaatggccgcatttttatcttaaccagcttcgcgagccgagtcaggtccatactccgctccgatcgtgtgtcaacgactgggtactatctatcgtctatggtgcgatgatacggggccatactcaaatggccctccacattatgccttggtggtcaaggatctgtgaattcttctagcataggccgagtcataatcagaaattcttcgacctcattcgttgaagaatccctgtccacttccgatcccgttctatgatttgtatgattgtggaaagttacctatccaaaatttatccgttaagggtgtaactgatcctgtcaggaattagccacttgcttacttcatgatatgaacaacactggacaaaccccagactgaagtccatcgggacacattccccaaaaaagtcctgagcacggcgtctgcgtgatatcgcgtgcacggccccttcctgactcggcccagtgccccacggtcaaacagaggtatatgtgcacgcctacacactccaccagcgaccaactgccaagtcgcgaaaagaagactcattcaccgagcccggtctgggcgatccagagggcgaattcccatccaaatggctctacggaaaagatcaactaaatgtgttcctggcctccgacctcgatttgctcgtgataatccttcctcaaacgcgtgacatgtgtggcatacttgaccgggagcaattcgcccttttcagcaagaggagggcctacgtgagtaaccccggtaggggcgcagtcatcaacacaaacgaactcattgaagcactggagtcgagtaagatccgtggagcagccctcgatgtcactgaccccgagcctttgccggctgaccacaagttgtggaaatacaataattttaccatcacgcctcactgcgctggaaactcgaaccactacactgaacgcgttctcaagatactggcgtacaatttggtaagacgagcgcagaacaaggaggttgtcaacagagtcaaaagtctttaagtctttaggatactagcttggcttcttgtcaggttttctttatcttagtgaagatctgaatagctttttcaatgatatgacgcttttaggaaacatacttcaattacaaaaactgaaccccacagctcaccgaaacccccattgaacactataccaatcaacatccatcaaaacaagccgtgacatattttgtaagatttcgaaaatactgatattgtctgttacctccgagcattcacatgggccgagtcgaacctgggatgactctgtccaatttctgtggcgaaaaagggcgaacgccggcctagaacatgaagaacgagggggcattgctcaaccctacgttatctaggccatgtggaatcttcaaagcttactccttcagattcaaagccgtccagtcgaagtcgatccatgccaatttgatattggaagcctaggtaaaaccagatagcatcaaaattgatgcaaggagccggcctccagtgctcaacgttccacctataatagcacgccaattgtgcagactaatttaatcacagcctccaccctcatctaggggtgtacagatataccccggtttctttacaggttgtgacgagacgttatgaagacgaaaaatgcctggtaatgataatagcgatacgtttgagatccagccgcgaacttgcctctgttatcaaatctgtcgatgtcgatctgtcgtatttaggccagatgactatatttcggtgtatgttgatgaggtatatgacattaagtgtgatcacgcattcactctctactgcgtttcgcccgtattttcttcgatatgtggctctatttctacgtagttctcggagttcagctcgcgagatatatctcatgtcagacccatgctctctgagaaagatagccttggtgcaagtgtggaatctgacttggcgcggggaaatcgaaatgccctaggaatacttatctcctgggtttattggattgcttcctcgggaatcctgaggttgcttatcattggctttgatctaatctgctagtgcctattcacgtatcccacctatcttgaaccttagcccgggccgagtcagtcagtttgcaggccttgctacctaattgattacactcaagcgctagtcgagtgtttctagtcagacttccaattgtataagggcttactatatatcagagaaacgcggcaaactaattcgcatctacgcagaacacccacaactccttactcaaccctcgaacaagacagagtccagactaccagtcgaaatatctatcaatatggctgatacgagccaaaacaatccaaaagatgtcaaagtgagccaggatgagcccaaagatatccaagggaccgtggaagaaggcgagatcagcaatggtcacttaagccgttcactttcacagcaacatttggtaagtagtttgctctcgaggctaactctccaactcaccatcaccccttcccaaatatgctgaattgaggtgtctgattttgacagatgatgatggccatcggtggtgtaattggacccggatattttgtgggaatgggaaccggcctatctaccgcaggaccagccggcctccttatttgtttctctgtcgttggaattctcctttggtttgtgatgcaatcacttggtgaattaggcgcctttatctcagtatcaggctcgttcacccattacagctccaggtttattgatccagcgtggggattcgctctgggctggaactacttctttctatggaccggtatcataatggcagaatacagtgcgtaaatcacaatcgaggacatttgctaacgctgtgaatactgtcattctaacaaaagcatcattgcagataacctcggattgattttaacatactgggatacatcgatgcctcgctggggctggactttggtcttttggtcaatactgcccccaaagcccaatgaaaataaatttgaagctaacctcctcttagggtttttttcatgtctttcgctttacttggtgtatgggcctttggtgaagcggaattctggctcgcattgctcaaggtactggctattgcaatatttttcctatgtgctattctgatctcctctggggtcattggtggccaaaagattggattcaaatactatgaagacccaggtccatttacaaatggggtgaaaggagtcttcgaaattttcgtttttgcggctctccaatacagtggcaccgaaatgatcggcctcacagcgggggaatctcaaaaccccaacaaggacattccaaaggcagtgaaaagcattatttggcgcatcgttgtcatctttctgggagggattttcttccttacaatcacagtcccatccaatgacccaaatctgctaagcgaaagcagtaaaacggctagctcacccttcgtcatcgcgttcaaccatgtaggggcaaaaaaaggtgctgatgctgtcaatgctgtcatcctactcaccatattctcagcagtgaacagtgctgtttatgtggggtcaaggactctgtatggactggccaaagaaggtgctgctcctaagatgttcctttacactgttcgaggcggcgttccgatagtggctttggttttcttccacctactcggattcctctcatttctcaatctgtcctctagtgcaggcgtggtgtacacctgggttatttcaatgacaggggttgcgacattcattacatgtcagtcttatattacatcccatgtcatccagagttctcttgctgatataacatgcttgaatagggggttcgatttgtttatgccacatacgcattcgcaaggcgatgcggcttcagaacgtttctgcgtctattttgccttaccaagcacagttttggccatatggtgcttatctaggatttggaatctcggtctttttcattttttttcaaggatggacatcgtttgcgccttggagcgtgcagaaattttttatgaattatgtcattgtcgtcgttttcattttcctcgccatatcgtggaaattctggcataaaacgagctgggtccaactgaacacggtggatttgatgagtggacggcgacacattggttgatgaagatagaacataccttcaacagtcctggattctctcatagcgccgatcacatccaccaatacaactcttttgacaatcaatcaaagttctatgaaccggatgcagtctcgctagttgcgcttcttccaaacagaagcaagaactcagttcgtactccataaaaccacccagaatagtaccatggggattcgcaaatcagaaagacgaagagtacttttcaacaaggaaaaagtcaaaacctgatagtcagtgtttatattgtcatcgctgtactttacttggtataagatgtcgctaccgtctaaagaagcgggggcaaacaaaaaggtgatgttgatggacgtaagtcaaaaaagcacctagaacctgaaattggcatacagaagtattgaacaattgattgctgaggtgaatcactctaaagaaacattgctgcaaatatagccaagggttcatttcgatgactctgagcttatgggaaccattttagccaagcactcggtcgtcgatagagattttcaatgccgagacgaactttagaaattccaaattcgactcccaagggtttctcctgaacctgtgcacgcacccaatcagccgtgatgcagtctctcgggctattttcgagtatccgaactgaatatccctgctaggcggcgttcccgtcggcaggtgttgatagaaagatatggatttttgtgttgctattagtgcgttattcttgttgcaatgccgttacaattccaagttttttttggcactatagagggatcaggctgatagtgttgaggtatcctgcgtgtagttatgcgagaagaggaagagagttgagattcccatgtaatgttacgacctgaaagatcagcggttacttcctatgattgttgaggagttccttcctgaccgaggagaagaacgttcttccctattgtgtaaaagggctaagcgaacgtattaagaattagggatttgcatatgtcaataaccaagattgttaccattgtgctaccattgcaacgattttgtattatatcgcagactgcaagcaagaatgctgatatggtgaattcttaaagctgcaatctaacagtgaactatcgacgcggataagacatgtatgattattattttctcttcggtagtcaacggtctaagttgattgttttaaatgaatagtatcggcttgcggtatgcgtggcagccgatgttctaccggagggtttcggactcataaaagagaaaaaaaccatatagatgatatattcctagacacatcatcattggaatgaaagatcaaacttccccttaggcattccttgactggccgtgacgttcttcaaccaaaacaagcccccaccttcattcaaagggtccccttctctgccgtcattcctagcactggtgactatgatttcattcatatcctggccaacccaagctccgtgtgtgactcggaaagcgttcaactcccatttttgaatgaactggcctctggggttgtatttttcaacaacagatccattccaaatgaaggtgaaaacgttccaatcgccgtcaacaatcagaccgtcaggttcgccagtttgcccacgtcgatcaatatggactcgttgatttttgatctctgcggtagttgaatcaaagtcgtacgcccagattatttgacgaaacgaatcggtgtggaacatgaccttgtgatcggatgtccagcctatcccatttgaacagactaccccttcatgttggattatgtggagagtctgatctggatcgtatcgatacaggccgccggtcggaacatatccttgtggaatttcgggacgcttcgaatcactggaacaacgagttaaataaaagcgaattgcataaggaagggaggggactcacgatccatcaagccagatatcaagagagccgaaccacaatcgccccatacaatccactgcactatcattcagccttgtcgtctttctatcatcaactttgatgaccttcaccaattctgtccagctcccatcatctcccagcatagcaagtgagttgaaggtgcagaggatgtatccgccttgtcggcaaaaattcatggaagccacagcctcagggaggttgatcgtcctccttgaatacggtatgcacgataggtcaagaacatgaatcgcatagccgagcacgtcgatgtagtggagcgtgttatcggacttcctgaatagaggactttcgcctagttcagtgtgtggctcaaggaatgccttgatggtctccatgctcgatatgctcgacaaactaagatgagttcagatttgtactgtgtatggcatttgaaaggcagcacgctgggatgagaaaagctatgtatagtacttgatagataaactccatggaatggggaagaaccgagtctggaacaggttacgggaccgcagtgctgactcggccctcatcggccccataattaatcaagctcgggagacatcattggtcagaattcacagatgtctttgctgattggctgacgcttatactctactttcgagtgactcttcttaaaaggtattgttatatatgataagcggtcggtgaaaagacaggtaaagaaatggtaacagccttggtttccgacgactatcactagtccgtttccggtattatctgggaaggagctatggactgttcttgtcgtattggaaggaaacgctcttttctgacacgcaagcgagataaaagtatatctaattttgtagggtttgtcgaaggacacacaaaaccgtgctctttgaatcctcgcttgtattttcttctcttcctcttcttcgtactcattgtttcgttagaaatgcagtctcaagcctgacaagatctagtatgtaacataacaataagtagttaccactttcaaatttaaaccttcaaaaccatacgattgtacggacctttattacgccctaggcctgcttcacccctacaacctgttacttagtaccgtagagctaaattgcgatcaatcaatcaatcagtcaaagttcgatttgttacgtgccaggtcttatagaacagaagagtgcatttctaacgaaacaataagtacgaagaagagaaagagaagaaaagaccaacgattattcgagatatttggttttgtacgcctcttgccaaatcatggaatctctaatgcgctggcttagctcgcttgcgtagcagaaagaaacgttcccttcttacatgggaaagaacgacccatcgatcttccagatcgtgaaaaccccaagtagtcctgtataaaaaggaaactatcaaaagaaatcaaaaatttgacggccatgagttgctattatgacatctgaatgctcagaaaggtcatggtctatcgaaaggtgtctcgctgcatcctttgcgagcttcttggaaggctttctcccgggcctccgaaagatacgccagagacccacggtcttttggtgacgggccatctggggtaggattgatattgaagttgaagatctgagttggtattccaacagaaacattcgcagtcggaatattgggcactgctaaaacttttgtttcaaccggagcagtagccagtagtgtgtaggcctgctcatgggagtatccgaagcgctgcagatagtccatagcgtgggtagcagcttggatgtatgaagtcgtcaaatcactgcgtttctgattgccttttttgtccactgagatgccatgaaaagcgagttgttggcggtacaatggctcggcaggactgggcaccacaatgggacagctcaatcctagtttctccattccacccggaaaaaccgagcatttgagcgtggcaataccggccatctcaatggcacatgtgggctcgccatcaccttgagaaaaatggagatccccgacggagagattcgctcccgggacgtagacagggaggtaaattcgagagccgccggtaaggcttccggcgtcgatattgccaccatgttcacgggcgggctttgttcttgcaccctctgttttgatcttgttcaaaaggttctctggaagcttttgtcccacaaaaaccccgttctcgacaggcatctgtgcacagaccactccgtggttttcgtggttttcgttgagggccccttctcgttctgaccaacgttgcagcagctcatgggaaggtgcagtgccgattactccacactgtggtctcccacaaaaggagacatcctttatatggcgagaagatgccattttcccatggaagtcccaaatactcttggccactcttgtttgaggctggtcaagaggcccaagtccgggatcaataagagagaacccccacattcggtctgggaatggctggacctctaaaatgtcaatgcagagcacatctccgggttgagcattggcaagaccccttacttatgttatgcggtcttcatatctgaaaatgtggcgctttggatgatgctcacgtataaaagaagccgggaatccccgtaccacccttccatgactcgacgcatcgaaatatcctaagattcttcaatattcattacctattctcttcgtcatgtcaaaggacaccaaacatccgtcagactccattgatacctcgcctgtcgatgactttcccgaaagaaacacgactttgggtgatctggagcatatgttgagagaccagcaatacttcagtcagagctacggtagacctggaatcaagtcttttgtgaagtcgcctgtcgttgtgctctgctcctgggcagcagctgtctgcgggtttctgtacggatacgaccaggggctcatcaatgtgactctgatcatcgatgattttctcaactcattcccggaggtaaatccagaacaatcacccagagcggctttctacaagggcttggtcgcagcaatatttgaattgggtgcggtagtcggagctttgcaatccgcaatcttttgtgatcgcatctctcgtcgatatactatcatcgtggcggtgttttggtaccttgttggcagtgccctgcaagctggtgcagtgaattacacgatgttggtatttggacgcctgattgggggagtgggcgttggtagagcatcgatgattgcgccgctgtatatttcagaaattgctccaccgcacatccgtggggctctttacactctgcagcagtggatgctgattctgggaattgtatctgcatactataccacttacggtgctcggcatatttctggccattggtcttggcggaccgcatttgtcgctcaaatgcttcctggtacggttttgctaggaatcgtcttggtgttgcccttctctcctcgctggctgggcattaaagggagagaccaagaatgccttgaaactttgtcaaaacttcgttgccttccggagagtgatgcaaggattcaggcggagtggattaacatccgatgcgacattttactccaacaacgtctcaacggacgctggcgagagcactcgaccggaggttcttccttttggcagcaatgcaaagttgaggggcgaaaatggggaaactgtgtttcatcgcgatacatcaaacgcatttatatagggattgttctcaacgctttccaacaatgggttggtgtcaatggtttcacatattattcaaccactctttttgcgcagcttggttacgactatgagcagcgacttactttatcgggactcctttcgattgttcaactcattgggtccactgttccggtgttcattatcgatcgtatcggtaggagaccgctcctgcttttcggaacattcatgttgatgtcatgtcatatcatcaattccgtgatcgttggaatctcctatacggactggccagggcaccaggccagcgctaaagctggaacagcattcatgttccttttcatgttcttttttgaaacctcctggggtcccattgcctggggccttccaagtgagatccttccatctatcgtccgcgctgagggaatggcactcagtacggcatctaactggttgagcaactttgtcgtcgggcttatagtaccatctttggtcgctgccgccccctacggatcgttcgcactcttctcctgcacttctctgtgtgctttgatctgggtgttcttctttgtacccgagacaaagggaacaagcttggagggcctaagtcttctattcaaggacaatgtttatgaagaggaagcagctcaacgaaacgaactcatatcagaattgatccgaacgcatgctcccctgggacaatctgaaaagtaataggtcattttgtccaaacaagtcatggcaagcgttgatttatgactcccacagttccacagtagggaaatctatcacaactgtctgtatgatggcccgtcatgtgactctacggatcgtttgcttatttgcttgtttgcttgctaatctgcttgctcttcgtttgctatttttttattacggagcgaagcgaagcaattatatattttctttctttattcatacatgtcaaaccccaagaatgttaccattgctttgtatatcttttttacagaccgcttatgtgacatttatgtatccattttgcttcctaattgtgcccaaccaagttgtcaattttggaccgttgttagttcagtgagcaaaagatcttgagtgaaaatcgtggcaacgttattccacaagctaccgagtggcctcctctatccaaaacgcatccagaaattagcatttagtcaattcaaccacccaccatgctaccaatacgcccccgaagctctagaaatccaatagagcaagagggtaggatcttattagccatataggcttttaagaatcaagaaatatcctcaatttgtcaagtggcgcgccattttgctataccccgtacacctttcctggctttggacctccgcatgggtccctaccctggaacctccaaccgcccattaaactctagaggttcggtaaggttcaacctcggaggcgaaacaaccaggatcgaccgccaaattgatgacgctggcctttcgttaaggggacaatggtcaagagttctggtgaacaactacatttggatggggctagcgtggtgcattttattgaggtgagctgctgacttagctgctccccgcgctttgctccagtgagcacctgagcaattcagagcgctcagatgatgcccagtgagcgagcctgctgagtatggaacactcaggagcgtgctcagctgtacccagtgagcaaaaagcggcaaggtctgagcactataacggaaagagaaagccaagaagtggcagaggaaatcaaggcgcgacactaattgcctagatcgtacatcgcacatcgtactccgcacagatcttggaaatctccgctttgtcttacgatcgagatgtcctcgcgaatcagccttatgtgccaagaacaagggctcccctatcggagaccatccgctgatccctagtcgaggggtaacccactccagtctcagctcttcaggcagccaatttcaatccatatcgagacgaatcctttgcacagggacttgcgctgataccaatttcatctctgccaattgccaattcaccatggttgccgagtacctcactatccgcaacaacacctccactccacttgtcctgaagcgcattgagcgcttccaggcaccggagaaagttgcgttctatgccttcagtacaatggctagaaacgtcacccaggtcttgaccaaccaaacccgcagcctcgaggtctccccaatcgaacaggacagccgtcccttcgaggaaaagaatgttgacattaaactggagccattcgcactgaagaagaccgagctacgcgcctttgtcaactccgaaaaggagcgcatgcgtctactcttcgaagtcgaaggccacaaataccaaatccaagtcccggtaccaacaaaagagtccgcagaaatgaaagcgctaagcgagaaccccaaacaccgctttaccggcgtttccgtggccccagaatccttattggcaatattctcgtccgcaaacctgaacgcctggatgcgcgagctccgcgacgacatcctcgtctctgcgctctcaatcccaggcacgcacaactcgcccacatgttacatcgcgccgccctcggtgcgctgccaggctgtgagcccgaaagagcaactcgagaacggcgtgcgattcttcgacatccgcgtgcagccgcagtacccggatgacgcggcgcgcgacgagctgattctcgtacacagtgtgttccccgtctcgctgacgggaaacaagtacttccgcgacctgatgcgtgaagtcgacgggttcctcgaacgcaacccgtccgagacgctgatcgtctccgttaagcgggagggaaccggtaacgcgactgacgagcatgtgtcgcgcatcctgcacgaccactacgctaaggcgggcagtcggtggtgggtggggcccaagatcccgacgctaggtgaggcgcgtggtaaggttattcttatgcgtcggtttggattgcagcagaagctgaaggacgcgcacggtgggcatggttggggtattgatgctgctgagtgggaggacaatacccccaacgctaagtgccccagtggccagctctgcatccaggatttctacgaggtgctggagagtatgaatatcgagcaaaagattaagttcgtcgcagagcagattgatcgggctagctgctgtcgctatccgtttggcgttcagcccgatatgcatgcgacaaaggcattccccttttacgtcaattttttgagtgccagtaacttctggaagacgaatacttggcccgagaagattgctgctaaggtcaacccagctaccgtgcattatatctgtcgccgaggtaaagagcatgatgccgactgctcgacgggtattcttgttacggactgggttggtttgaatggagattgggatcttgtgcgctgcgttgtgggcatgaatgccaaactgcgtttgagacaggattagatgataaacatcgtttacatacatccggaggttaggaggaaatttgtcttttaggcgcggcatgcagggaatgcaatgattcatgggttaaacagagaatatgatgcactaaagttgatttcttacaagtatacattgaccctgaagtaggaagcgggggtcttgacgaaacgcagaatatcatctattatacaggaaaatgaatcagaatgatcatgaccagattaggacgattcgctcttgtcgccctccggtcccttctgctcttcttccaacacactccggcggctctccaaggtaaagtagatgctcttgccggctccctccaaagtagttgcaacgctagagctcatgctctgcaaggccatgacaagctgggagcggagaccgtccatgccaccctcgatgctgccgacccacttggtctgatcgatatcaaacacctggttgtccacacgggcagccagcaagttaatcttgctgagaccgttctgaacaatgggctcgtggtattccgggttcgccttgcgggtaggggccttgaagccggattccttgggggcaaggattgacagcgccgccttcatgtgttcaggcgagacgctaggaatggaaaggatagcaacagggccgacgagcagaggagaaagctcgtgcatgcccttcatgtttttcaccgcctcgtaggcagtgcgagacaagtcgtgtgtcaaggccgggtcgtcctttgagccggagagcgcagggatctcggcagaggtttgtgtcacggggtcaactgcacttggggggtttcctgcacccagagaagcctcgctgggtcggaagtactcgacaattcgcagagccgcctcaaagatgctggtctggatagtctggatcttaatgtaaggagcgagggcaggcgctgtccggccttcggcggcaatcttctcatccactttttgcagggcaagggttagttctcgtcggatggcggcccattccatggacttgaggttgttgtgttggaacagcacaatgagaggagatgtgcggagaagggaggtgtacgaccgtaggagctgcgaccggcggtattcgggattgcggtgcgacggtggctgagtaggagggaaccttgatacaggagctggtgagcgtgtcatctgctcaattgaagcagctggcgtgaatgctggggccgcagcactggatgcgctcctgataattcggagttcatattggcatcgagggatttgttgaagcgacgagattcttaaccgaggcggcattgtgattgttttaggtggtgaatttaccaatgcccaggaaattcaagaagttgatatacacaggtcaagataggtcgagacaagccccgggaaatgatatttttagggtcccaaaagggtaaagcgcttcggaggcggtgatgtatattgccgcctatatcgggctctcattgagtcacttgttatgatcttgcaggtatctttttaagcttgtggaacctcattgggattgctaggccactgtaaacatacagtcgcttacaaagatttcaagtatggcgacatctacatcctctccttctcagcggccggagtccatttcgatcgccccgctcctccagcgactcgcctaccccgccgctgccggtattcgagtcagcgcacaagatctcccagctgtgagtgcagaggagattgcttctgcctttgcactaatcttcgaggaccggctatctcaaattcaaaccgctgccctcctcacattgctccactcaaccggcaaggatagacaggcagatgtgattgcgaaatgttctcaatgcatgcgcgaggctgcttgccaagttgagaaaggtccgcttacgaagattatcaagtctcgtaatctgaaagcaggaaattaccagggtggattggtatgcgcatatgcacactccgtccattttgtcattgaggtatattgacagaccgcgatgtatagtgtgatattgttggaactggaggagattctcactcaacctttaacatttccacgacctcctcaatagttgcgtctcctcttctcatgacagctaaacatggcaaccgcgctcaaacatcgacctccggggccgccgatgtcctcaacgccatccagccattggcacccaagatcgcagccatcaccgctgacaacctggcccaggtctacgagaaaaccaactactcgttcttgtttgctccgaatttccacccgggcatgatgcattccaaccctgtccgcagggctctcggtctccgaacgattttcaacctgatgggccctttggcaaaccccgttgactgggcactggaagcgcgcgtagttggtgtggcataccagagccttggcccggtatttgccgaggccttcaaacaaagtggagcgaagaaagccatgattgtttgcggtgcagaggacatggacgaaatcagctgcgctggaaagacaaactgctggaggctctctgagtacccgaaccctgcatacaaagcatcagaagacgatgcagatgactcgagtgatgatgataccgacaatcctcgtacactcgtcaagatcgacaccttccagcttcagccatcggactttggcctctctactcatcccctcagtgatgtgggcggaggtaaaatgcccaagcaaaacgcggaaaagctgatgagcatacttcgaaatgagcttccacgggatgaccccatcttggagtttgtcctcatgaatgttgctggtctgcttgtcacctcgggaatttgcgaggcagataccagcaacatgggacctggcgatgatggtcaggtcatcaccgagcgtggccctgccggtggccgctggaaagaaggcgtgcgtcgcgcacgctgggcaatcgagagcgggcagtctctgaagcatttggagcaattcattgaagtaactaaccagctctgaagtaggattttgtgaaacttaggtagttgtaggcttggatttagaatgccttttcgggtctaagaagctttcggatttggggtatgcaattgtttcacctgttctgatgggtgagctgaatgtacctagatatttcgggtctatgagtgaatgtcattgaatctctgaaagcagatatgattggtttttttttagaaaaaagagcttaagcctgtcctccatacactagaggacatggccagaatatagtatctgttttgtacactgggaccatagaaaaaaccagtttgtgtcattcaacaccaaagcgccattgtatgcataattcgtcaaaagataaagatgtcaaaaccagaggatctcaggtcgattccgcctgggccatcgcaacctccgaacgtctggttcctgtcttaatagacaaaacggctaccgagcctggaactggaccatactattgagagaaagaaaaaagaagtcagcctgggcctcgcgcatatcgcatgataattcccaggaaagagaatcttaccgcttggtccgctctttgtacagcacacggtgaccgcagtccttgcagcggatctggtcgccgcgcttgagaggaacacgggcagagcactcgccgcacaggtaggtaactgaggggctgtcgatggccatggcactgccaaaacctccggcttgggtgtcgaagttgttctgggtgcccatcgcggggacctggtaagtttcgcgagacatcgtttgagattgagagtggcgtagtagtaaagtgattattttgcgcgcgagttgatcgtgtccagtggaaagataagagttgtgaggtggaaacgagctgcttctaagctgagatactcgggattctttttctttctagagcgcgggattttaggtgcttagtcatgcattccgtagattagtcatcgcgtccagatctccaccatttgggagtataaaagtcctctgattcttttagaaagtaggtttggaattctatgctctcataacttcattaattaatagcattgatcgtatttgaaggtatttataccttactcctatacatttatcgtgttataagccgagagcaattcagcccgccatgtatcatcgaccctaacttcaaaattatggtatatcccccagaaacatgcaagaaaaatcagatccccgcgctatgcaaaagaagtaaagaagaggctgctaagagaaccaccacaaagttgaatcatgcagcagcaaaatggagcagagaagagttaccaaccaccaccgatcttccctgcaagctccacaacccgacttgtatcattagcaggtgtttgatccttgccaacatcactttcgaccttgcgatatgtagtatagacgagcttggagatggggatattcatatattctgaccaggaccgcaagccttcatgaattttagcctccttgtcagccaacgagaacagctgggactgagtctccagctcagtctcagactcagattccatggaataataagcctcgtcgacgcgagcaagccacgcgcgctgctcatgtggtgatggtttcatagatacgtctagtgcttctccttgggaaataccaagggtttctctggcgtcctcgactcggatctggccaccgccattcgtgcacccaccaggacaagccatgacctccacataagcgtagtctgatccagagctgcttgtggacacggcgttacgagatataggctggcgccgccctgcggcgggtctagcgacaggtctggcggcaggttttgcgccaggaagcctcgacacacgggcgggcttgagtttccgaacaaggttttggatatttcggaaaccataatagcgagctgctttcaaaattgtttggccctcttgagacatgagcacgtactcgacgacatcgacattgcgtccgcggttgatcacaagtttgctgcctgaattgcgagcttggaaagtcatgagaacctgatgtaggtagcctccagaggtacctgcagcaagagtttgttccgcccgagagcgcttgagggaaaggagagaaccgagagttttttcagggaagggcggtgtgaaagacaaaggcagaggttgcaaaggcaggtttgacagtgagaaccctcgagacgaagctagggatagaagctcacgtgcagtgataacacagtctacgtcgcgaaccggctgtgtctcagagctcgtggaatctccctgtcgccacgacacatctgtgagttcttctcgactggcttctagtttcttgtcaaagcagggcatgactgctaaatgccaaatccgcgaagggtggaccccgagggacttgctcaaaacggttttgaggaatgtccccgatagagcctgcggggacttgagtcgagaaaggtgtggaaggataaatgggtgagtcttttcagcgtagcaaatccatccaggacatgctgaggataaaataggtcgtttggggagagagtcatccgactggcccgcggttgttgagtcctctgagttgagggagtccgaaacctcgtctgcagtgagcactaacacagcctctcgcatggcattggtgtcgacaacccatgtaaatccattgccgtatttacccccactccgcaagccctgcgggccactaagtaattggttgatcatgtaccccgcttctttctccgaaatcccatatgttgtggcgatactagccctgacttgcgggctgacactggccacgaagatcttgccctctccagaatcctcggtattattgactatcaccccatgatgctcatgcttcaagggaatctccggatgcgcgtcaagtgtattgaggacctctgcgtgagactggagtgatatcaacactgcttcggcagatgtaacacagccagagcaagcgagacagtctgtcaaagaaatctgtgcggggggtagatcctcgggctggactttgtcttccgttgttacttcataggcgtcctataattagagaattagtaaaagaaactcaaataccacgcagttccaatgagataaatgagtggacatacttcttgattctttgtatcctttggtggaagggtttcaactggtttgatacacgcgaccccgggcgaaatgaaatcattcagatcgtctgctgacaggatcgcgctcattgtggcggagtacgctttcggcggccgtgaatgcacagaaagaaatgactaaatttagccaatttgattgcaaggagtaatgagaatcaataaagacatcgaaaccttggaggatcaaaatagttcttcaagagggcgaatagttaagccaacggcgttgcatgctttgtcatggtggcgagatcggagatgatctcaccgccttatgcgggctgcacttgccttgattggtcagattggaactatgcacgtgacctgcttgatgtttctttcaacttcgacattctgtgagagttgcgactctttgtgttctcttatcttttcagttaatactatgtatataggtaactctactagcttacatgtagtcaatgaataagtaaatacagtccataaagagctactggaatgctcttcttcatcaaattatcaacttccctactgtttttctatcattaggccatgcgagcgcctgtccagtccgatacctccagatcgacacagtccaaacgatcaatagataccctgtacgccaatcaatcacccacaagcaaaagcaactgcagcagtagcggcctcactagagcgatgagtgacgttggtgttgatgttgacactggcgaccttaacacgccgcccgtcactatagtcggcttttcagatttcgtggcaagtcagcctggtgtacttgaagagcaagataaggtcgacacgtctcccctggctgggaaacgccctcctagtactcatggaaacaagggaagtggagtgaataaggtttcgcgcgatgaaatgtggcaggtcattacaacaacaacgaaagccgcgataggaattctgcacaaaacagaattggagggaactaagtttgcttatctggcgaacatatttaacgctccagtcctaggccttaaggcccctaacctcagggagtatccaaacctaaccactgtggttagggtcgaggcgggagacacatatgaccaagccctcaagatacacaatgctggcagcaccatcgatctaatgccagtatgtgttcttagctttgccaatggtgaaatgcccggtgggggctggctcaacggtgctcgagcccaggaggaacagctctgctaccgaagcacactcgtttacactctccaccctcggttctacccaatgcaagatcatgagtgcgtctattcacccaatgtgatcattttcagagatagcgcggataccggatatagcttcatgtcggcggatgacaagctacacatgaacccaactgtcagtgttgtcagcatggcagcgcgaagcagacctcaattgaccgccgaccaatccacgtacaaggacgtggcacagcgatatcttatgaaagcgaagatgcaattgattctacgcacggcagcacacaacaatcaccgccgcttggttctcggcgcccttggttgtggcgcgtttcgtcatccccctcaggaggtagccgactgctggaaagaagttctcatggatggagaattcagtggatggtttgagttgattcactttgcaatcagagactcaaacgctgagaataatcttgcaattttcacagagacattggatggtttgaacatgggataggtttaattccatttatctgtgttagcttcttccacttgggagaagtttggggtcttcttagacaggcgcaaattaaacaagaatcttctagtcaagttgtgtgttaaagaagtggcattgacagtacggaataaagcgagagtaaacccaaatttaaaatactgcctggcaatattaatcaatgggagggccatgctccgtgtcacgatatacttatagatcgccagtacttgacttcatacacctcacttagatgtacgtgtagatcgtctcctgccagcaacggcgggctttaccttctcctcctcagagcactcactctttatagtggggttcttttgttttggggctcctcgcttctttgtctgtgtcgtttcttccgcttcggactcgctttctttctttagagccacacgcttccgttttgaattggccggtgcggattttgcagcgttttcatcaatatctttgccgacagggccagtcttcttctggacagctggaacaacagcacttgttcgtcctccaacggtaaggaacgtgattttatccccattcggtagggcggcgggctggttcttcttcccctttccccagcggtgtttgaaaagccagttctcgggaaacttctctgaatccgctagcacaccaatagatgtagagcatacataatgaatggcagagtgcagcgccttgatctgatcagcattcaaagtgttgctgtattgctctgggtgtatcttggcatgatagagaatctcgtcgcttaatataattagcttatttcatggcttttgtttacctggaagacctaccccatccaatttccgattccactgatattcgcctggtcgagcagaaaggccttgatcggcactttcttcttccccagcttctctgtcaaccatgcttcattcacggtgtctttatcggcaaccggatcaggcccattttccttgagcggcgtatgattgcggatctcatcagcgggacaatccaccagtctaatgcgactaagcctgcgggcatccacaaatgctgcctctgttttcggctcgtcgcttgtctccagaaggaacttccaatatttaggaggccactcctgatctgccggcttgtcggttcgatagtagtatgtgtcggcatccttgatcttcaaccaaccagacatcccaaagtgcatcacagcgtgtggtggtgaagacattgtgagccagaaatattttccttgttggcctgctcccacaatccttttcccttgcattgcagtttgaaattcggaggcactagtgccaactttgccaaatataatatcatcatgttgggcttggactttagacagtgtttttccaaccaggtgctcacgaatgaaatgcacaatgcggtagacctctgctagttcaggcattttggtatgatgcttccagtttcagtagtaaaagcatgtaataaatgaattcaaaggcaaatacaagtgcttttttcccgaaagacgatctggcataagcagacgcgatgctcctaaacgcgggtcgcgttgtcacgtgcatatagttgaacaggctagtcctaaaacggactggtgcttaaggcttgattacggcatgacgacggtggttgacggagactttgctcgggctattcatgaatgttaccaacaactagtatcagttcgttattctgctcattgcagtctatactaggcctcagtgagatatattcagcatcacaagtatcaaagatacgcttataacgccattggacgacctaccttcatcaaatacgcctactcacatccttactacaaactggagtggttttgggccaagccgaatcgagaagctggcgagcacactggtaggagcatgtcgcaaccctcatctacagctcctccggcgctgacgcctcggttctgttttgacgagagactactcagaggttcgttcgaaatatgacatcttgataccggcttatattgactttactatttcctctttctgttcagattttctccgactttcaagatctacgatcgatgactcgattacacagaacttgaacgcgttgattacaccagcccagagaggatttgacccagcatcaacagcggtgcgacaacccgagtctggctctcggatcaactccgcagcgtgtcagaacttcaaagataatgtgttattcccgtcatggcaaacgagatcagacgttctcacttactgcgctggtgtggctacgagtccggatcccgacgatcccgacttgattcttcggcagacagaatccgcccgagaccgggaacgagaagttgatgagcgtctggatccctactccgctcgtttctttccacgtgaaccacggactgagtcattggccaatttaattcgcaatgaacgcacggtcgaagagatcgttcgggcccgaacgtgggggatggtgtcagaaaaatgcagtggatcttcttctacttgggaagaagctctcaatacctggcgccattcccatcagaaatgaatcctccagcaggagcgtgccgcagtatactaggatcactatataactcaactcttctttagactcgggaaggcctcatcccaaattgtacagatttgcacagatccgacattatcatatccgtttatttgcatcttcactttgcttgcagtagaatacattactttaagaaactgaggaatcctttctagctcaaactttttgtgctcttaagacagtgaaaatttgcactacagtacataacaaaccacgtgcgcatcacgagatgtgcattttgccccctattgacttcaggtatatatggtcaatggttatacgtattcaacctggtttacaaccaaaattttacttgtgaagaagtcggctgctcgctatcttatcggaccattagctctgccaagatcggactcggagaggtcgtcccccgcacacatcgattcctcactcgcacaagtcaggtccctcgacgtcagcatcgcccacaatgccggaaacattgagcaccaaggaccattccttgtttcgtcaagtggttcaccactttgagatgaaacagtataagaaaggttggcctccgaaacgaccctgaactacctaggcttgtctaaccacgttttactttacaggtatcaaaatagcagaccaggttcttcgcaaaaatccgaaacatggcgacacgcaagccatgaaggctttgaatatgagccagatagggcaattggaggacgcctttgcgcttgctaagaaggctctccagaatgatatgaagtcgcatatcacctggcacgtgtatgggttgctcttacgccaggagaagaactacgaggaggccatcaaagcataccgattcgccctgcgtctggagcccgaatcgcaaccaattcagcgtgatctggcactgctccagatgcagatgcgggactaccaaggatacattcggagccgcagtgcgatgctgcaaactcgtccgggcttccgccagaactggacggcgctcgctatcgcccatcacttggccggggatttggcagaggccgagaaagttctgactacctacgaggacacattgaagggtgccataccacatgtcgctgatatggagaactcggaggccaccttgtacaagaacacgatcattgctgagactggaaacctcgaaagagctctagagcaccttgaggctgttggataccgatgcaccgatgtgctcgcagtcatggagatgaaggccgattaccttttgcgactggaccgcaaggcggaggcggagggcgcatatacagctctcctagagcgcaacccggacaactcgatttactacaatgggttgatcaaggcaaaggatatccccgaaagcgaccacaaggcattgaaagctctatacgatgagtgggtgaagaagaatccccgctgtgatgctgctcgtcgcattcctctcgatttcttagaaggagacgatttcaagcaggctgctgacatctatctgcagcgcatgctgaagaagggtgttccttcattattcgtgaacatcaagcagctttacgttaacccagccaagcgtgatgtagtacaggaattggtggagggatatctctccgaaaagacagcaaatggatccgcggagtcgaacggggacaacaacgagttcctgtcatgcacatactacttcctggctcaacactacaactatcacctcagccgcaacctccccaaggctatggaaaacgttgagaaggcaattgaactgtcgccgaagtctgtagaatatcagatgaccaaggcgcgaatctggaagcactacgggaacccagagaaggcagcagaagaaatggagaaggctcgactgctagacgagaaggatcgtcatatcaacaccaaggcggccaaatacgtgctccgaaacaacgataacgagaaggctctggacctcatgagcaaattcactcgcaacgagaccgtcggtggcacattgggtgatctccatgagatgcaatgcacctggttcttgaccgaggacgccgaggcgtttctccgacagaagaagcttggtcttgccctgaagcgcttccactcggtttttggcatctttgatacgtggcaggaagatcagttcgacttccacggcttctctctccgcaagggaatgatcagggcctacgtggacatggtgcgctgggaagaccgcctgcgtgagcatcccttttatacaagaatggctctcggtgccgtccaggcccacctacttcttcatgaccagccggacctcgtgcatggaccgatgcctagcggaattaatgggatcgattctaccgatgagaaccagaggaagaaggctctcaagaaggccaagaaggagcagcagcgcttggaaaagatcgaatccgacaagcgtgcagcaaggaaggcagctgccgctaatgccaagggtgccgacggggagaccaaaaaggaggataccgatcctctgggcaacgccttagtccagactcaggatcccatgaaggatgccatgaagttcctgacgccgttgcttgattcaagccctcagaacatcgaagcccagtgcctcgggtttgaggtttactctagaaggagtgagttgatatggtagattctaataccggacgggaccctcatgctaatacgattatagacaagcacctcctcgccgtcaagtgccttgtggccgcccattccatcgatccctccaaccccactctccaccttcaattgcttcgcttccgcaagtctcttgagagccttgccgagcctcttcccgaacaggtcgccgaggttgtcaatgccgaatttgacaagctgcttccaaagacccagaaactcgacgagtggaacgagtcttacctctcggctaacaagggcagtgtggcacatgtgcaggccggtttgtctgcccgtcaactcctgaaccctgaatccaagccgcagtgcgaacaagatctgcttgctaccctcgattcccccgatatcactattgacgaggctgtcactgccttggacattttgaacaagtggggcagtgataagactgcttacgccgagaaggcgagcaagaagtggcccgagtcttcggtctttaagctgaactgatttgatacgaatggagaaccgtgtggactcccacccccatccccgcttcgatcatgagttgcctagctgcctagcaatataaggagttaggacaacaaaataaggttacagacatagagaaagacacgggatgagcaaatatactctggtattggccgatgctaagtgcagtgagtatacaggtgctgggagaatccaatgtaccagtacaatcaagccagggctaatcgtagattaatctactccaaaattcaaaatcactgtttctatcaatgtacatttctaaaatcggaccttcaaacgccttattatacaagccgaggagggagtcacaatatgctaaacaaaaagaccaacacatgccgtgctgaatgccagggaagaatccatcccgtaaccgttatagtatataacataatttcaaattgtgaagatcagacagaagacgtctgaatatctcttcactgttcgtcttctccgtcgatgttacccaaaatgggcttacgtctcaggacctcgtcactctcgccgtagccgtaatcgatccacatgcgcttccagaaaggcacgtgagccggtcgctcttcgccaagaatgtattcctgttgctcggcgatgcgttgagagcgcgcctcatcttcttgggagagggtggcgcgctgcatgcgcgaggcaatgcgcggatcaagcacgatatcgtcgagccactcgcgttccttcacgttctcgtcttcatcgcgcttgtgcacagacttgtgccactcaatttcagcagcctccattacggtctgctgctcatagttgcgaggggggaggtcggtgaacgagctgtcaagagaaagtgtggattcgctggcgggagtagactcggaatctgcgataaaggtgtcttcgcggtatggccgtgcgctattcgcgaggacgagtgcggcaacatcgcgcccgacgtcctcggcaaggtaacgttgtgtgagaaagcggtagattcggatcggggtgttcaggaagccaaggagatggggaaattcaactggggtggagctgtcgaaggactgggggatggtgttggggagggtggcggaggagtattcgctggggtagatgtatgcaggagtaggaccagctggcttggcaggcttctcttcttctttcttctcttccttctcgggttcctcgatcttaggcgctgggatctcgtcctttttctcttcggagaactcgggggaatcgatgctcgcaatctcagggaccgcgagactagcgggtttctctgcactgacgtcctgcgatagatccacgctcaactcctccgcaggcggaagcggcgcatccaagggcccgagccaaccctcatgcaagccccggatatactccttccaggtgtgccggccgatgatcaagtcgcccttggggcccggttcgtcagtgaccccaatgtgtgcccgggtagcagcaacgactgcatccacgccgacctcttcgggcgctgagctgggctctccggcctttcggcgcagcttgcgaatgttttctgccgtgttgaatctcacatcgccctcacgtcgcccttcgaccactgtgtaatccagcgccgcggccactaggatgggcttgacatattccttgaagtgatcccgagccacacgaagaccgtctcccggtggcgcagcaagatataccgtcatcttccggcgcatttggtcgactggcagagtttctttcgaaatgtgggccacgagctccgaccacttttgttgcacgcgacgcttctcccgacgatcgtatataagagcaccagcgaatgatccagtgatagtaaagaagatcatccagttgcgagagggcagtttgaaccgcatattaggaagacctattaatcacagcagtattagcatttttaccactcgaatctggggaacagagacatacccatcattttgaatactgggttaggcggcttcggggccaccgggggcttgccagcgccctcgggcgcggcagagctcgaggaatctgccattgggctgtatgatggagaaatggcttatacgtataaataaagtacacccggggcatgctcgttcggggaaaattgttgcctcgggattaccttatcccgactacacgtgacttggtatcagactcggatcgggtcgcgacatgtgaaatgtaaataaacggcacgctgtcacgtaacctaccttcaatgccgccgacataaaagacccgtctttgctctttatcaccggcgaacgtctttattcacataacctcgcagcctttttagaaaggtacacctgtacctggaaggtctctggtttctggagcggcacttcctagagtaaatcaagctcctcgattgccgcttaaaagcccaattgtaccagtcttataacctatttaatgcgcctatacaatgagaataacatatataatgtaaagctacgtgttattcgatgttctctgtttctgtttttttatcagagaaatcgagtgtgaatgtcaacggggcatagtagaaactgctctgaaaagaaatgtcgttagcatgctttataactcgagaggcctgataccagttgagaaaactccgaaaatctttctataacgaaaaggaaatcggtgagtattggtggtggtatatatactacttcggccctagctttcttattcagtgtagtaaaaaagtaggcaaaaaaatgtgagaattcttttagtatagtactatctctactatctccccttaactgataggtatatagaaacaattcccgtttcccgctagatactattattgtatacaccctgtataggaaccctcctactgtaaagccttatcccgcccttaatgaggccgtggtccatttgctaattataggtaagttttctgacaagttcttactataagacgtttaaaagtagggggaatcccctgccatagaatatattgtgcttaaggtatggcgaccttttagtactgaagcggtcactgaggaggctctcgtgagcctaaacgaataaaaggctaactctgtaaatcgtatgctaactttctaacccattcgcgaactctagttccctcttctgctgaatcattttggcgtagtattacccacgtagatacttaaggtcctggtgctttgttggttaataataggttattagccgctaaagtatatgttttagtatgatcccattcctactccttgctcgtcttctatggcccgatcaaacaaatcttcgaagtcgttgctacaccgaaagactgcaagattccccgctggatataactgaagcggttgcggcttaagcgaactagcgactgccctggaacggctcgctggtatgatcttttggtctaattgttaattataagaaacgagatttttatactccctgtttaagtttggcagtaatcagttattaaaaccacccttttcagtttggtatcgctgccctaggcggggtacctttctccaaaatagtcatgtagtcatataccacgtcggttacattcgggatttaaggcactatgtattttctacccccttttcagtggtaatcatggctaaggcttcctgtccacagcccccttcttccatacggagcattcccccatactgtggctgtgcttaatatactgacctaaaatgcgagcctgagctatatcagcctcagaaccagatatataaaccctttgttttcccttgtctaattcttccttagacctcggacgtaaggaagtctatttcccactcttcaatgtgcttcacacaatcctcggttacccttaatccaccacgactttcctcggttggttcttgtattattttcttgaaagaaatacgcgctaatctgtcttgcctcggtctagattgtcaagaatgtcaacatcctccagcctcagaaaagccaagttgatgaggcgctggaaaaaagccgggattgttggtgtcacctcgcatcactagcctgcgcctatcgggatcatggcttgactccggagtatacaaacccgcgcctcatcctctataggataccaaaattctaaggccggcccagaaaagtccatgttcgcccttatggtgtctctccaattcctgtgctttgtatgggcctcttctacttggaaattggtaggaaacccgaactgctatatgatcgagaaagaaattacaaattctgccctactgaagattggtatcggtgttgctacttcttacggtctttgtgggagaatcttcagttcttggattggtataacagaagagagtcacgccggtcccaattatctagggattctcacagttacatggtgttatatactctctgcgctgctcgttgaaattcaaggggagggcgctagtacgtattatacaatctctgagaccgatggtgaaaccctctccgatcccctacagatatatacccttgacgttggggaagcgaatgataatgtggctcgatggtggtatgtgatactcgtttaatatgaagggtggagagcgatagtgaaataaattcccgaaggtgaattcctagtactatgggcggtgtcccgcacgtgtcaaacacgcctcagaatcaaacagaagagatactcgccggctttagcttgctctcctttaactttagaacaaacctttgatgcccttactgagtttgcgtgtttccgtgaactgggtagccaatcacctattactcttatgacagctataacgtttctaatgcattaacactatggctcaactgtctaactaccatttctaatagtcactggtggtaaactgcgcacggttcctatttcgtagatatggttaagtttaattagagacctgccctactatatgaccctaagctgtagtccggaagtagtgatgtcgattctttacagatcattctgggaacttgaagtaccttataatctctttaacccttggttgtatctagttcttaacgagatactaagtggaacttctggcacgtaacaatgattacgaaatacttgctttaatggatgcaatatattgaccaaatattagcgctcactggatcggggtagcgataagcgagttagccctaaaaatcatttaaaaggtaagaagataagaagaggtaggcctcctcttgacgcacttgcctttccctggactggttgtccttaaagctttatagatactgtaggcttaggtccatatacttgtgtgaatgcggaatacatttcaaggccagacgtgtggcgttttctccacctccctctaaacgaggacgatgacttatgctattgcaatagatcctatataccctgggcaccctgtgggatctctaaaacaaaagattgcgctcttcgtgtgacttcgcacttgaaatgcaatcgatatgagtaccattaccactactagaaccgggacacagaagaaggagcgattctttaggaccatggattttcaacgacagatggtttgatgcattctgaggagctcactgtcgctccatgcagtttgtagaccttctgtgtggcattcctttccctttctttctcttctctgacagacagctcaccggcaaacgcgcagcttgccgcgtcgacgctttcctttgtatgtctgcagagatgcttctcctgtgttctggtaggtagaatctggctgccttggtagtacgaagctatatagacaggcttcggtacagtagctagtttcgcatcttccatcaacacatcttccatcaacatctcctggttgatcacttcttccctcgtagtcagaacctctcatcaatcgctgatcaagtcacaaggtacgtgaaaacaaacattctgtcggatgagacgttcaaacatgtttcaagtgttggagtagagtttgcacaggcggaagacgcagcgcagtgcctgatgagaatcctcggcgacaggagtatcaacgggcattctttactcgtctcaggaagaaaatgggcttccagtggatacattgatctggatctggaagactacccaagcaatgcgttgattcgcgagatccaaggggaccaaataaaatcagctcctgttgagcttggattatttttgtgagcagcaacaaaactggctcaaagtgatgccaccgtgggaccaagctcttggtctctttattcggtgttttgcatttgcaaatcccgatatcgtttgttctcatggcagtggcatgtcataagcagactgcaatgtgggatacagcatatccggaagccccatatacccattgagtatgtcatcggtgcttatgttccaaaggaagtccggccataagtctgtatcatctacctgtgcaacttgtgtggcgccataagtttcacccatcagggaaacatcttgcgagattgcgctattggccaaagtagagggcccgaagccgccatcggataatcctataggtatttgggctgtatcttcagaaggcaccaggtgatacttttgctcgaaccattcaaggatatgccacagccatgcctcgtagaagtacttagagtgctgtttcccatctacagccactctgtccttgctgagccattggattagttgtaacacagtccgcaaaatgtgtggcatgttcaaatccgagcaaagggcacgaacatgtggactgcgtggggcgtattttgcccccatgatggccagtttgcagcctagaaccaagttaaagcccgattgcagccattggatatgactgatcagccgatgagtcttcggagccaatgtgaaaaagtaatcaaagaatttctttgcttcggtcatgccgcggttgagaaattcgacctggaaaggtgataagtctaacggttggtggccacttttgaggtgtggtggtagccctgggtctgcatgggagcgaggcgcgggcgaagccgaatagttggctgtttcatgtttttcaaataagcaagcctggcatagaaacaactgaagagtgtgtagttgaaattgaaagagggctaaaccgtgggccgtgagttagcaatagtttcagcgtaatcaatcaaattcacaagcggtgtcacttacaattgtccgaaggcgttgccgacaaggtcgttctgtattcgttgatttcgatttggaatgcatgcatatcaacctctcgtactggattcgcagtagtggccacagcatcatcgatccgttcaaagatttgttgtaattttactaattgtactaagcagcgatcactggcaatctcagcattggatagtaatccaagtgcatgcttttcaacataggacagccgagtcatcatgcgatccttttgcaacattgtcgagtgactgcagacacccatacccagtcagtaatatgagggggatatgggcattgttactgaccatgaggatagcatgtaacatccaatcaaagctcgtcttctctcgttcaccgaatgtctactactgttttcatctgaagagaccttgctcatagccatccgtgaatagtatgaatggatttccgacaaccggtcaagccgcaaatcaccgacgatactccaagcaagattaatgtagctgcaaaatctttcatgctgggactgatgctgcaacctgggatattgaggctttgagtcagtagtgtcatcttcaataaaaccacgttggattagactcaccatgccaaagccacaagaagccccagcaataaatccatagatggattatgggcgaagatcatctgatcagcaactgctttttgaaatgtctcttccaatatctgctgggaggctgcattcttgtatgatgagaccttgaggatagccagcaagagaagcggtttctctgctcgcagctgcgcaagcgtcacttccggtgcgatatagataaaagggaaaaatggcatcaaggtttctcgaaaagattcaagaatcgtgacagcatcatcaaatctcacgatcccgcgatcaataacatctcggggtttatccgggatggaatgaggttctgggtcaggcaggactaaaggaacatcagcctggtgtttagtgtgctgattattgacgacttgagctaagagctgatccactttggcttcgagagcctcgactcgtctgattttttaagcttccgtcagcttggattcacagtcacgaatcaaatgggatttgggagccttacgtccccttcttagcggggttgtaacgaggtcgagcgggccgaaaatagcactctttgccaaggcggcgacatctgagctcttatattagcatatggttatagttgagaataaacatgatgttcgagttccactacttgccgatcacagatagaggaatccgaagttcggatacatctgattttgccacgagcacaattttgacatgttttgatgtgtcctgacatagattccatgttccaaattggtatagtcacggtgaaaggagcatcaggacgaggcgagttgaagaggataaggataaggacacggacaaggacacggacacggacaaggatacggtcgaagggcaaagtcttggcatcggtggcccgccaggcaacggctttactagggatccactacatcgtatcaatcttgatggcaagttgattattggtttgactatggattcgaaggatttgggagtgagattatctcaagttgaagctttaaaatacccacacagcctcgtaatgatcattaactatggataggcagcgtcaaacacctttgggtctgcacataaatagtgccgaatctagcatggatttgctgatatcaatttaaccacagcactcattctcttcaaagtgatttgatctactatatttcccaagcctctttactattgcgtgatcatgtccaattcggataattgcactttgcagacatgtcctttagatgatgcttatatccagtatcagcctaacgtggccgggaacatcttctatctcgctcttttcgcaatcatactcattggacagatcggtacgggtatcgtatttcgatcttggactttcatggtgccaatggtcgcgggccttatattggaggtcataggatatctgggccgaattctcttacatgataaccctttcaacttcgatgatttcttgatgtgggttactgagcctaccacataattgaatgtatgctgaccgaggcgtgatgcattaggtatctgatatgtctcaccattgccccggcattcttcacggctggaatctatctatgcctcggtcgtattgttacagtttacggcgaagagttctcacgcttaaaaccaagatcctatacctacttgttcgtgacttgcgatctgatttctctgatcttgcaagcggccggtggagccatcacttcaattgccgaagtacagtcacttcgcgatactggtgtcaacatcatgatcgctggactggtctttcaagttgtatcactagtattgttctctattctagccattgagtatggagttcgggttttaagagggagaggcctgcattcccctactcaggaacgaccgacaaactggatgaggagatcgttcttgcttggtaagtaaaccacctcgatcttttctatgggcattccactgactcgagtttcattatcaggtttaacaactgccgttctaactatattgatccgatcttcattccgagtggccgagctccagggtggattccagagtaaattggccaacgacgaaatagccttgatgattctcgaaggcgctatgatttcaattgcgtgcatttgcttgaccggtctacatcccgctttgcttgtgggtaagaactgggggacgcctaaagcaattgcacgagacttggaaatggaagataaataagccacaaaaacaagagggactgacgctggttatggacctgttgggtcggcggtttttcagccgccaaggataatcatggtgcatacaacaatgctttttggatatcatttgaggttatggaatagctatgttaagtctttgtacggaagtcactgattcgattgaatgcaatatctattcccccatgttattcttagttataagacttttcccgaccaagtaagcactcacttttgccaataacgttcgacgacagcgataccttctaaggtctttagcttaaagtttagagggagccatctaagactgcgaaaatgttccagtctggctcgagtttcctcgcaaagaatgggatcggtctagtattggtgctcatcggtttgagccgaatttacagatgcaggtgctatagaggaggtcaattacaaagactagggtggaaaattcgtattataggaagcgacaaagtcgaggtcgtctcgaggcgtaggtaacgaggataggaggataggaggtgcaaggataccggagaggagggaaggcgaagcatcttataggcgctcaaatggaccgggcgaaaaggaaggggacttgaattcagctaaaagggaaccattctcggcgtcattttagtggccagtagaaacgagtgtaaaagccgtctaagtcgagcgtcaacatcaggaccggaggatgactaaaattactgggcgggtgcataatagtggtgttatagggcagcggtcaaggggcggctagacgtcccaaagttacgggtgaaaaggcagccgtttctggcctcaaaagcggtcattttcggcgtcaatcccacaggtcctcatattctagttgtaaatataggctcttcgccctgttctggccacccgagtccctgggctttgcctttacatgaatactgcaatcgtctaggcgaatcatagaagaagcaactgcctgacacacggcatgcaggccacaaaataccatcgtcttctggaagcaaggcatggaatgataagaaagtatacatcgtataacctggagtactagagatagaacatgattaccaaactgtctttatttcgactccccggtactggtatgattctctgccatctctaatctatctcagcttgctgcttagcaaccttggagaaccctgtgattgtgtgttgagttgaattgaaacttatcgcttacccaaccccctgaaaataaacaacgcaatcacaaaggagatgcaaatcatgccaaaattcattcattggaccgcggtccttgcatactttgtgattccagtctgaacagctgttgcaatagcccaaagctcgacccaggctatttgctgtcttcaatagcccagcaccaagcgcctgctcctctggggccagtgcctcagctactagtaggcttatctctggccggataatcccaacgcttgagcatgtgagtattcgtagtctggaagaatggcccctagttgtctggtgattattagctagacctagatagatagatgccacttgtggaatatatgagtacatagccagtgaaatgttttacgaggcacttgcacttggtacttgtataccatccacgagatgcggtatgactggtccgactgactcaggcgattcggcctcaagagccacaaaagtatcgatgtgaagtaattgtgaatagggaaaatggtggcctccttcttttgctatcacgtcaagtgaactagccaatcacaccatcggacaacgaatgccattgagcttctgggcagccactggggcactgcctcctatcctcaccattcaagatgacaattcaaccgactatgaacgccccgagccatgatatccaactgcgtggcctaagtgataatagtgtggcggtcgatgacagcaaagcgagtggcatggaaggcggggaaggcaatgatacaagcctacacgaagagaatcctacggattctgaaatcactaaagaatatcccactggcctgaagttctggctcattattctcaccatggccgccttgattatcctaggtgggcttgacaccaatattgttgctaccgctgtgcccaggtgcgaagttgaaaggcgaaggttccaatattccataagctaatcgcattttgatttctagtattaccgatgagttccacacaatggctgacgttggctggtactcatcgggatttagactcttacaagtatgaggtttagacagaaaatagtcaaactcgatttgctgagcaacctgctcttcattccagcgctgaccagccttttcattgcattttcttcagactactcagatacgcgaaacattgcctcggcgatggaggctcattccccatagtatcagaaccatcaaacgacgcttccacgactggagaatactccacaacccactcaccatttttgaacacttgtcttagaaatactgtgctatcataggttgatatgaaaccatacctcagttgaagatccaacatatatccgatgagttgcgcaaataatttggctttgcgctgggctgtcgggtactttttgaacttgtgctcattcacccagggggatttcaactcccacatagcctggatctggtcaatgtcgactgggtcggttgaaataagtgccacatcgggcgtgagggtatatccggaatagacactagcaatattggctgatttggaatctccaaatttcactgcgatgttttgagcattcaacactgatccaacaacctgacccacagattgctggaatcgcccttgaagcccgtgctcatcgccaatggcaacaaattccgcatcaacccgtctactctggaggctccatcctagcaagctcggggaccagtcttggttattctcaaattgcttcacatcttggaagaagtctggccagttgtgtaaggtcccgaggaatcttccctcatgcaatgcgcttgacgtggtgtgataagggccaatatccagcggtggcaggggctttcgtagaagggtacggcctgttatcattgccggcattttgaattgagctaatcaatcattcgttagtacggaccatacacctggaatgtagagtctagagtctatattatagacgataacatactggaaagtgtatagtgcaggaaaaaaagaaagaagagtggtgataatgtgtgggtgaaacacagtggagtgggcagaggatgttgtctgtaacaatgagggacttgttgttgttgatgtcgagagctgactgtggatatataagcttgtaagtcgttcgatggagacattcagaggagatttggaacgcgacagagaacacctttgaagtcgtttttggtttggaaaacacctatcaagggcccgatgacgaacggagattatcaaatgagtacagagtgcaactgtgagacgtgaagacagtacacgacgtagaagatgaacgagatgaaaaggtaaacaaaaggtacaaaagctaaataggcaggcaccgacttccagcgctcagcctcgacagcggccattgttgaatagcctctctgtcgagcccacaatggcagaattgccgccaaaagcagtggccaagctacacagatcatgaatggtgcattcaatgtgaaattcaaaagtattagactcaacagtaccccctattctagagcacagtaatgacattttcgaaatcagagttatggtccacaatccactagaaacagccaacaaaaaagctcatatgcatggcacaaaaatatcgatacttgtttaagcgcaccacctcggaacacaggctccgtcttcattgatcccagtatactctcaacaagcttcctatactatagctttgcatctctccttggcctcaccaatccaagcgccgacatttgacgcctatccattaaagcggccttttaccgaagagtactgttggatttcacacactctgtaacttaacttcttcaacaattcaatccatatctcacattgcaccatgcactttgacgtccaccaagtagacctctcctaacaagtacttcgggtctatatccaatgctatctagaaagcattgaagagtactaacagagagagagaagccacgtgactctcagtcactaacctgttcccattctcaaacatgagtttgttacaaatgcccaccttacgggaatagctcaagtagttcatgcagggctcagtgaggatttgatttaatcagagagtcggagttggactggtcaagcgattcttcataattagaactagcaaaatgtatccccattccttactttgtcatgagaccttcgtctaccatctccagcccttttcatcgtgataggtatcaatggaagtgatactaaggtaccattcatctgacttgctgtccgatacaaggtcaaactgcacaaagaggtagtcatcccattttgcataaccgtcttgaggccatcagggatggccattttggagaaagaaaaaagaattgtattgtttcctcaaagagaagaaaagagaagaaaagagaaaaaagagggaaataccagtaaggacatgattagaatagttgctcgggagatagttttcaacccaagtttataaggaaagagcatatcccactcactggcttggtacttactctaaagtggcaaccgcggcagacctcgtagacgcataatcaggaatctcaaccctaaccctgacctctcccacttcaccttgaaacaagaacccaatatccctcgttgaatcaaccagctccacctccctccgcacaaaccggctcttatcaagaccattgtccgttttctcaagctcagagccaatatcaaggggaagttcatcctcactatcctcattccattcaaccacggcctcatcgccaacttgtttctctacaggatcccactcgtccgtctcccagaccagccgaaacccaaacgccggtagcccgaagagccgcgacacaagcgccttgacctggtacgtatcaaacgagccaggaatctccttgacttgactcttggattcgtcatttccagttggcagacggaaagccatcttgaccagtcgcgctgctacagaccgcggatggatgactctggcgcctgaagaattcgacaaaaccgctcttgtgatagtcggctcgacgtatagctcgcacagctcactgtaccgcgggtgtgtggcgagaatggcgggttcttcttcctcggtcgtggcggagagttctttgccgatgagggataggtagtacatctctgcattggagcggtcttggggagagatggtgctgtagttcagggtggtgagggagggtgggaaccgagatagggttagcataaaagcttcgtcgacggtcattggtttggaggcttctgtgacagatggtgggaggggtggttggtcgaagaggggattggcagtgattcggagggtggttagacctgggaagacagtagggagtttgttgaggatggtccaagaggtgatattattgcgggatagatcgagagagcggagagtcggcgggaattggaagtctaggtttgtatctgtggtgttttggttgacggtgctgataccgtttccacggagggagaggtgctccaattttggaagtgcagcgaggtgtcgaagagctgatattgaggtgatttcattgtgctcgagggttaatgttgtgatagtgctagggagtggacacgttatctcagagagctggttcgcagatgccgtgagagacgtcaagtcagggaatcgatatgcaatggcagtgatctatgtccgaagtcagctttactcaatagtatctgtggtggacagggcacatacttcatcccagctaagcagggtttgttctaaatgtagctcagtaatccccttgaagatcaggtcttcctccaacgcttgaaatcggtttccgctattctccaatcagatctactattaagaatttggccagatttgagacttacttcaacctcagccgtttcaggtgcttaagctgatcgcagatatcccaaacatcgcgccaccgactcaataagcttcgactaagatcaagttcggtgatcttaggacaggtttctccaatcttttgtgctgcctcattatgtgagacttgggcttgattgtaggatgcaaggactccaacaacccgtaggccatcaagcaagacaatgcgtaactcttggagctcagcgagctgtttccgaattttgtcgaagccaacttcttcaacaaccttgccgctaatctcaattgccttgccttgaattgctgatccactagccaaagcattgtgggaaaggccatgctcggtctccgaagcatacttctcccgcagcgcttctagaaagctcagaggctggtctgaaggcctggaggggcgaacaaaagaccccgccgtgggatgtttacttttgcctggaatcacgttagcaataatgcaatacaaaagtgagatattcatacatgagaagtacctgacgcctttatgctctcctgaatgcttgcctcgacttgcgtcgtcccattcaacacctaaccagtcaccggtggtcccttgaacagtacccacatagcgaatagtacttaagtgatcatcaaatgaacgacgttgacctacaagtgagacagtcatagctcagggcagacctaacagttcatttgttcatgttttggtgagcgctacttcgtactgtgatccatgcccaaatagccagcttatgtaatcaacagcatttcacatggccagaccaggctcaacttggattgatagttgaagatcaggcgcatttcatgtaatactagataatacactgcatgtatagtaggtcaagcctagatgcagctagcaaactctttttgtaagctttttaacaagaaaaagccgataaagagtcatattgtagcatgtagaagaaggcggtgtctctatcaagaaggcggtatataaaaagaatttccggtagaaaggtgggtcgctgtagttaccgcccgcgcaaaacacctagagatagtgagcttcacccactttcttttctgcaacctaccgcatcaagatggattaccaggtacgtacacgctgacttagcccgcgcggcttcatctctttcatcaagaaagagcttatcgctgacacatcccgcagaacagagctggttccaagttcggcggcggcggcgtcgcctcccaatctgccaccaacgccgaccgacgtgagcgacttcgcagaatcgccatggagactatggatatcgagaaagatccctacatcttcaagaacaacgtgggcaccttcgaatgccgtctctgcctgacagtccaccagaacgacggctcctacctcgcccacacccagggccgcaagcaccagaccaatctggagcgacgcgctgcccgcgaggaccgggaaggcaaaaaggatcaatccaccttgcctggtgtcgccggtgttcaggtcaagaagcagctgatcaagatcggccgacctggttacaagatcaccaagatccgcgacccattgactcgccagaacggaatgttgttccagctgcagttccaggagatcactccgggcgtcaagccccgtgtgcgcttcatgtcggcctttgagcagcaggtcgagactcccgacaagaactaccagtacctggtggttgccgccgaaccctaccagaacagtgcgttcaagatccaggcgaaggagatcgatcgccgcgacgagaactactggacctggttcgacgaggacagcaaggagttctggatccagatcctgttcaagactgagcgtgaggagatcttcagcggtgttcctggtctcgcgccctcccagacctgaaattgtttttttttttcgatatcctctttgcgcgtttttttatctttatctttatctttaaccatgcgcgtcaatcaatcaatcaatcgatgaaagttcaattaacctgttgcagtctaactagttgcgtatgactatgtaggcgcttctccaatcgaagcaagaattcgaagctaaacgccgagccggtatctcccccatagatgccgatttcttatagcgcatagaacctataaagccccatgctgtagtgggggattccagtataggatgactaagcggccatatgaatgactcctagcaacgcagacaccttcagccaccttctcttcttagtagtcaccccatggtgttctcctctctagcaccctaatactcccagtgacgactctactctcacacctgtttcgcaggaaagactctcggtgcccctgctgtcccattgcagtgtcccctcttctcgctttctctttactctctcctgccccagtcctgactggtagtattgttatcttggcccgttgattggcctattcgtcgactattgctgagtttctcgcttcacagctttatcaatcgtcactggctggtacccatcgtgttccaagcctaattctatagccgcgaggcctattggttcctcgtcgtcgtcctcctcgatatccacttgttggaactgctggaggagacctgtttggcgcatgattttgaccacgtagcgggtggtctgcgggtttgatatgatcttgttatcgtccatttccttgataacaactgcccatagctgctccctcagctttatacgcgggatgatatatcctgggcattgtttaaggatatgcttcggtgtttgtgatccctcatcacagctgcaccggtctgtctctgctgccttgatgttgaataagaaatgccgaagcccgattctaaccatgcgcgtgtcggccttccagcttagagttatgacaccaatcaatggaactatcaaattatgaaatatcctacgatgaacatagtcccctcctaatttctgtgttgatattcgcctaacatacttgatgtggtcttttttgtctctttagatatccatacctgctgctggagctcgatccctccattctctactacccctatgccctccaccccatatctaatgccgggacagtccctatgccctccaccccatatctaatgccgggacagtccctatcaccgtaccaaatatgattgagaagaggataagactatcagggatggccatgatgtgaaaaaaaagaaagatttgtgattgatgtttattcaacgtgaagaaaagaaaatatttatggtaaattcgatgttgacgatggccctcctacctcgccaacacgccttcatggtcctcgcgcggcgcgtcgctccagattcgtctggtgctttcgaccctgggtgtccaggtccaaaagcaactcatcaagactggctgacccggatacaaaatcaccaaaacccgcgacgaattagcccgtggaggcgttgacggaagagttcaagctagcttagatgaatggtaaatcttcgtccttttgtggctgttgcgcgtactgccagttcgttcggcatggcaataagcccacttgctttgagaacgcgtccaatacatgcagaacgatgatgatgctaattgtaatggtgtatgtgagaagaagagaagagaggaagatagaagagccaatacatagtctgcgtagtttccatgattggagggagtagttgctcagggggatggtcaagacatctgaagagacatgtaaagagatcgggactaggggtttctgtcgacttcacatatgtatatactatccttaccttatgcttattatatagttatatagcactgacgatgaactcacccttctccgcagggtcagtgactagtcattgtcaagtaaagctaagatgagcttaaatgtaactatactacatacttatctttagtctaaacattataccgctactatcttttaagctaagttatatgtgaagcaaagcggaaaacgcagtactacttgtcccctttccatgatagaggattaaaagtcggatcaacaccaaatcgtggttgtaggtatgcggtatgccacccacggtcagactagctcgggggatctagtcttaggacaggtagcttaattgaatatgtttgatgtttgctagtttacagaagtggccagctatataaagcaggccatcgtctgtgatctggaacgactgatggatggatatgatcgacccggttcgccgactcgcaggcttctgaaaccagtcatagcattgggcaacaaagtcattgtatacggctgaggcactaacgtccaatgtagtcttctctgttttagagactcaaaacgcattcgactgtgaaccggccaagtatatgaaaaaatagtgcattgcaagaagggcagacatagtcagaaaagacgagtgcattttatttttagggtaatatcctgactatcctaaatcagctgggtctatccgaagatgtgacaagtagtgtcgtcttgaaagggatgcaaggcgttagatacatatgtatcaacaagtgaaaccgaagatgggtcataattcgggaaaacaacatcgcgctgatatgctcaatgagaatgagtaacgaggtgaaaacaaagccgagtttttttctgaccgacaaaagagtaccattgagaaacaaaggatgcaagccctgcatgcttcccttgtccccgggaatcgtttcgatcagtctcggaacacaacaaacaataaacctaagtggtttcgaaggcattgaatgccttataggtgtagccgatgaatggcaaactcatctcggcttcctgtgagtccggcatggcacgggcctgggcgcggtggatcgcgctagtgtcctcctgaggaatctcatcaatcgggaagtacgacacatcaatgttcgagctgagacgcggctcgaagggagcacggatgctgcgcagttgatcccaaacaacacccctgaagaaggggtggcttttgatctgtgtcgcgcctccgtgctgaccaccttcgctgccaatacggtgatccgggtcacacaagaaactagacaattcagttagcggatgatcctgttgaatttggatgcatagataaaagcccaccttcggatcagcgcctcggagtcacggccaagaaccagttcatccgggaagtacaagcactctctccagttcacgattttccggtaagtgtcatttgtgtcttcagcacagaacggaggccagcccacgagacattcaaacatgatggcaccaacagaccaccaatcgcagagataagtgtagccttgaccgttgaaaatctcaggagcaatataatcaggagttccgacagtcgaataggccatggcacgacgtgactttcgccaggtattgatctgaccacggttggacactgtcaggttgatggcatcattgaagtatccagagttgcggttccgatccttggaggtagagttcttgaggaggttttggtagtaagcgttgtcatgagtcttcttgcctccggttgacagaccgaagtcagtaagcttgacgtgtccaccgcgatcaagcaagatgttgtcaggtttgatatcactgccaaagaaacattcattagtatggattgtcttgtatgttggcgtgtgcacttgattcttcatcggagagagagagagaaaaatgcatattgccaatgtccaactcgcgaccaaaaggcacttaccgatggaggaaaccaagcttgtgtacggcttcaattgccatcacgacctcggccatgtagaaccgtgtaatgtcctcagagaagatctcgtacttgatcaacatggtcatcaaatcaccaccaggcaaaaactccatcagtaggtaaaggtacgcagcatcctggaacgatgcgtgaagcttcacaagccaagggttgtcctttgaatcagccagaatatcacgctcggcacggacgtgggctaattgatccttcttgaacatttcggtcttgatcaacgacttgagggcgtaaatcttgccatcagtcttgcgctgcaccagcttgacctcaccgaaagcaccctttccgataatcttgatggtctggaagtttgccggtgtctcctttgtgcgcaggaaccgaaggaaatcggactctcgcttggaaatcacgtcggcatcctgtcgcttcttttcgatggggatattggggtcacggagggttttatcgagttccgccgatctataggggcgaacatcatagataagtcacaactcggaaacaatatttcaaggattccattggggacatggatacttaccgcatgttacggtcacgggcccgttcaatattctcgtggaagaacacagtcaccaactcctttgctgccttgcctcgcttgtgggcgttctcggagtaccgatcggggaagcgctgcaactcttcgctctcggggggtgggcgagggctgcgaggcaccggggggatcaggtgtgatgcttgggcctgtgtttgagccggggagccaccagcggtgcggggccgctgggctggggaaccagcccgattattgaaaaaccctgcacggtttgagttaagatcctgattagagaattgctggatcagaccgttggtgccgtcagggtagcccgggcgcgcttggtaggcgggctggggagattgcaacgcttgctgttgcgcgtactgctgttgctgttgctgctgttgctgggcatactgcggctgtacctgttggggtgggtaattgttgggcaggaaataacccggggcgtaagcgggattggaggggtcgacgtattcctgggccccctgagtctgatagatgggctgggggaaggcggagggggtagtgggataggcgcggttgttggcattgtagttacggtcatagccgtaattcatattgttgcggttgttattgttgggatccatcttgactcgaactcccaagggacttttcaagggtgatgggggagaagaaagttgagaggaagggagttgaggacgagggcggggagtttaaagaagcggtggctcaggtgctcaggaggcaatctagccccagcgtaactggttgacttgttgtttacatgttacatctttctaccacacgattacctgaaacagctgtgttcgaaatgtctttgatacttttcttttcatctaatgatttaccagaagcaagcgaaatagtctgagggagggaattaccagtgtgccaataagctgatatcgatgttttgaaagaggacaatatgttttacatgcatactttgcacgtagcacctatgttgtagtaaacaacggctctccgggagaatccctggaatatcccgaggtcactggcatccagggcgttgtgtatattgtacagcttttttcgcaacttcttggttttctctttccaatttgggaactcagctcttgccgcttttggaggagcccctggatgtattacataagtacaccacgtgatctcggcctaaaataacttctgctccgcatacgaaccaaacctcagaaagaaacggatcctgaccattcttttcactgcataacgagaacttacctattaactacgggaaatagaactacggaaaagagtgtcttctattatttcaacaaagcatatagccgacagaacctatatctcaaggacaccatcgaatcggacgtccttataccgtgctatatactaaacccattcggtggtgtccttgagattctatgcttcgttgactttatagaagttacctgcaagcatacttgataggtaagctctcgttgtggggtcaagggaatggtcaggatccgtttctgatacctcggatcgcagccaagcctatcccccatctcgagatcttggctacgtaggccgttataggttcaggggatcatcagaatcttgcgcgtagtcgatcctagtatgatatctctggacggctggccggtacccacgtccattagctgttatggacgtagcgtggtcatttcatctcgatatcacgtgaagttttgttctacatcccaggaggtaaaggaactaactacagaaaagcaaaattccgagtgacagacattaatcggtcaatatgtacacaagacagatggaatcatatcattataatcccacatgttcggggcggaagaaaaggccaaaacgccgtagtgctttgcgcgctcactgcccagtcccctaaacccccaatagaaacaaaaagaaagaaatggtgaacaggcagagaattgagatcgtatcatcggaacagaagaaaacataacgcctgaccatgatgcttttgttttgtcgaccgcaaaagaacaagatgaaaaccccgtgaggacgcaggatcgagaggatggtgtaatggtccttggttaggaactcattatgcaaggagtaatgaaagagtatgaggggcaatggagacgctcgaaagcggtgttagtcacaatggagtggattacccgcgagcaacccaccatgaacggactgccatgcagcaaatccgcttgtagacttgtgttgtgcccttgccctcggcttcttcttcgaggaacttctgtgcgacgaagagcctggttcctgcctctttctcggtggtgtagcccaccttgggcaggctgttggggaagtcagcccagcgctgtcctaggtgacgtgcgacagagatggagtagatgatgtcccgattttcgtatgtgtctagcaattgtcgacaccgactgagggtgtcgtcgatctgtttggccgagcttgcttcgttgtcataaagtgtgaggaattccccgacttggtcccagaaatccaattggcggctctggaactgatccggagagttcggggggttggcggcatccatgaccagctcccgcgacaatgggtttgagtccaggtggttccaagtaagcaatgcttcaaccacgtttaaccgtgcgcaagacacacagagattccagtcccgcccctgttgtccagtctctccgtccggtaccttgcgacacaacgacatgcttttccagataatcgaagcctcgaaactctctagacgagcaagggtttcaccgtcttgaagatcccattcgttgaacgcgatgatcaaagccgaataatccgccataagctgggcatcggccatgagtaatgagagagcattttcggaataccagcgaacctcaagaagcttgtcgatcgcaggtgcatatgtggccaggaaaactgcttggatctcttcgaggcggcctggtggaagagttgcgacagggtgagggggaggaggagcaattcccctcaaagagaataggtcattgacatagagatttttggctgtggagtggattgttagctacccgtgcataatgctgcaatatgcagatgaagaaacaaattatatgaactcacctttatatgaaggctctgagccctgttgccgtggtacgccagtgttctgcatttctgtatgattggattgatggttcgttgccaaagaagaatcgatggaagctctgtgctcgtgttggtcggtagaggcagtgggcgattcggattgaagggaaggagcaaatggttgagacgaagcgggcatgtacccgggaggagcagaaggatatgaagggtatgaaggtgctgatgaattagaatgtccttgaggattgacaatcagcgaaggaggagggttaggagctggttgaatagctgaaggtgtagatgcttgagtccgaaacacaggatcgtagcccaaacattcacgtttgcttttcacacaatttctgcagaccggatgtgcttcgtcacactaaaatcgagttagacgtgaaaatggccaaatatccaaaaagccgataaaaaaaaaagaagttggagattgagagggaggtggatttaaggcaaaataaatggcggggtctggcgggcacaagcgagcgactccgccccgcgaaaactacatttgcgctcaccttgattcttcgtttgcgacaggttaaacaaccggtttttgtgcgtcgcttgacttctttcttgtgtctattgcctgataacatcttgttcgggtcccccgggagttgatatcgcatttgcgcattccccatattggagggatagcccgtcatgtattgtcccatggaagccatcggaggcatattgtttgggagcggcgatccaatcggtgcctgtggcacctgtccttgggatccggaattgtgatacatgtcgttttgataatgttgcggctgtgtctgaaactggtgggtatgcgcctgtggtgattgatggcttcctggttgttgggattgagcgggactatgcgaatattggtatgaaccgttggttgaatgaaagtgagatgtcccattcacagccccattgtcgtgcccacccgtagagtccgccatgcccgcgttcgaatcatgatggtccaaatgactactgtcgccgaaatcatggccatccattgttgggatatcatcagttccaatcgctggtaaggaatggtcgagggaaatcgcaggaagtgacatgtcgggaggtgcagatgaacctattgaaggcaaggcatcaaaggactgcaattccgaatcatcgaagccatttgatgtgtccatgggtggaagtgatggatcaatcgctggaagtgatgattccacagacggtaaagtcacatctggaccttgtgcttgctgggtagcttctggtggctgatacgtgctggcatcctgtggtgggcctgcggcggacgaatttggtgctgctggcacttctggtgttgctgatacttctggtatttgtggtacttccggtggcagcacctctggcactgctgattcaactggtggttctggtggctctgacggtgttggttgggctgattgagctggttcagctggttgagttggcgccaccggttcttgacttgtttccacaatgggttgattcgtttccgctggtaaaggctcattctgggataagggttgttctgtctcaacagctggcgcattcggttcggtcgcaggattggtggattcgccaggcggggcgctcgagtccgtcggctccgccatactggaattcacagcctcccaatgaaagtctcgatcggaggggagaattggtagatattttgcaagtaggcttcggagacaaggtcttgagtaaaggagtagtcgagtaggcaaggtcaaaggtcgtctggtttgtggctgagcgaagaaatcacaccaggtcgaacggatggggagttagaaatcatttattccctatgatctgtggggtccagcatttgttagtcaaaatattcggccagcattatcgtcagtgtcccgtatcggagagtgatagagtcctcgatgtcgatcatcaacatcgccaggaaagaagcactatgctagcgcaggccctccatttccacgtctttaaatccaatcggcggatgaaccatgtgcaggatatgtactgagcgcaaggactgtgcatttgtacgaatgtccatatgatatagagacctcatggcgtgtccagatatcctgctagtcaatcgaggttttgtaggtcgcattcgcggtggccgaccagcctcaaatgtaaccatctgtcaacaactcccacggggtctcggaaaagcatcgcgaggtagaatctagcactcaatgacctcatttgacagcaggaatactggacatcgtatcgcacggggtgaggctccggcgcgagacggtgcgcattggtcgagggattggcagggcctgcggggatcgcgacttgctcgaatttcaaagacttaccaggtagatagatttttaagataagatcgacagaagcacaaatcgcggggagactatgcagatgcgagggtcgcgggtcaagaaaagcgcgaaagagagaggctaaaggagctttcctttccggcgttgaaactctccgctttgattgtgaaggaaaaaaaattatagtggcaaacaccgctttctaccccaacattgcatattccgaagtttgatatctgtgttttcacattatttacgttatttacacttgttttatttgttttgtgaatgctttgctgatactgttgtcttatttggacttcgattaacatagggtcgaattaatagtgtcgcatacagcccttctagtctagatccatggaccatccatgaaagctatagattgtcctgggaagaggcgctggcataagtcagcctctacatggtcaaaggtccgcttcaaacgtgcacgtgtgccaatgaataggacgcgtttgaagataggcattcaacacagaagccttaagcttgcaaatgatcctatgggtgaatgggttcgaagtgtacattctggggagcaatattctgccacgagtcttttgctgaagaatgtggtacatctctgatattgcttggcgcagtggaagtcgtgcattgtgtgcctgttgcttgaagccacatagttgcagacttggagactcgtggggtcatgggccaatggatagaagtcggatgtagaaagacccgaggggttaggattctcaagggtatgggcttgcatttaaatttgagccacgacaaataagttttgcggatatcacatcctctgaaggtggcactatttcctcattgccttcggcttgcgcttcttgaagacgacaccaggcgtagcatcttcactctgcggcttctcttcaaaaactggctctactgaagattgagcgggctcttcagtcttgatctcacttgactcattcgtctcttgcgcctctggcttgaaagaatcatcttctgtctttgcagtgagggtaggttgttcagtagctgtctcttgctcatcaagctcgactttcggaatgaaggttttcgtcctcttaatatcttttgtggatgcaatcaagtcatccaagccctcgtcctcttgtgcaccagggtattgcctcatcctcgagccccaacctttgttgataataggttcaggcgcgtgctcatcctcctcctcatcgccttcaagtttgcgcttgcgtattccaactgactttgtggggccttctaatccttgctggacctcgatccttgtctcagatgtcgtctgccaatcccctgctaaggccatatcagcgcggaattcctcggggacggcgacacccattgccacgagctgtgccatctgtttctttcgttcttctagggaagcaggtcgggctgtggatttaggggctggcggtgggtttcctttcgcgctgtctttgtcggtggaggacccgccactgacagcctgtcgcaatcgttcgacttcggttttcgcgcgttgtgaatctctttgtttttgttcattgtcattgtgtatttgtctaaggaagcgcttgagattgccttgatgttttgggctggcttcgtgttgggtcttttcgaagggcgtgtcacggatgaagaccttgcactgtttgcaccagtagcgcggctgtgaaatagtcagcagggttctagacaggtaaatttcacacttactgctgatttccagaattcagacatgccggagtactgagttggaataagaggaggtgaattatcgagactttgatcgcattgatattgcccggcagaaagctacgtagttaccccactccgttggccaattaaccggaacttcccttcaccacctaggaacatagctctataccgagtactccgtatatatttgtactatttggactacctccacttctatgggactaagcagatcttagcaaaggatgctcaggtcagtgacatgtgcatattactaagttgtccctaagaactcgggaaattgtcatattaagtcttataagagctatcaatcttccgaaccaagaatttccagttcggtaactaattacaaaatcggcagtcctgctcgagattatagtatatctgcaaagcagaaaggttctgtatagtagagagaaagaaggacgaccaaacaggcaaagaggacgacgacgtattatcgggtttataagtaaacagcaaagagagagagagagagagattgatagaagggttcatttctgaaaacacattttcatgacaatttgggatcatgctagatcaaagcataggtttatgggtgctgtggcaaggtgcaggcgtgattcaatccagttccgctgtcgagacgcccaaagcccaaggtccatcatcatagatcgtagaacgacgaacatccctcgcagtcatcgtcgcggtatatgggttggcacgatgcatcgattggctatgaaaatcagtaaagaataatataagacgggtgagacttaccgattatcccaccagaccatatcacccccagacaaccactccatgctgaagacatactgctctagttagccctggattttaacagaatacggctgacttaaactcacttttgattgtgtacagtgtttaatcaactcccaaatcagcctttggctctcttcaatatcctttccaacgatccgtttggcatgcgccgccagatacaatgttttccgcccgtctggtgctgtttgtacgagacggtggtaggccggtggtttggctgccagttcgtggggaaggggatttccaaacacagttggtgccgcgagctttcgggaatgccagagacttaatgaagttagcttcagacacggggagatttcgaaacagctggcttactcgtgctcgacaacgaggttctcaatctcgtcctttttcgcttgagatagatcaccgtacgcacgacgtgtgtctgcaaaatgggtccatgatccgcctgcgactgggtttccatgagaaagcagtatggaatacttggaccgatgttggtgatatgtggagtcctagattgggttagtacccatgtggctttttggggacgatgatgattacagtgtgccatagcgcattgcccagactgtggtagtacctgcgactatccatcttcaccagagagccatcctgctcgatgctattctcatcagaatgtgatatatatttaagtttgcatgtggaatactcacttggcaacgtcgaagagtaacggttcacctaatcggtcattttcacgtccgtaaaagaacggattgatttctagtttgtcacccaattgttgcgagaaagcaatgtgccgaatattgtctagctccgtctttcgaaagatcagtactgcatacttgtcttgcaaagcgatcaactagcatcttgtcagtggtttcttccaacctctcaaatattaactcacttgcgcgacgacgtcatctgatacaggtttgctccagtcaacgccgtatacttcggcaccaaagaatgaatcttccgagtggagtattgggtggatagacaatgtgccttcttggatcgtttcttgagcacctgtccgagaaggacatgtgttatcgtacaccaagatgtgcatatcgtccaccaagctatgcatatcgtcagacattgaattgcgaagtgagttgtgtgatctcttgatttgagaggcactcctcgtttttgatatctccagataaacccgcacgcggcttcaagcccgcgcggcccgaccccgaagatgccgatgcaagagctacggccactcaaataggatagcatttcctacctgtgagaaaagctaataattttacttcttctcatatcaccataatgacctccatcctaataaaagccggtccataccggttccgtgcgaggttcgaatcgtcagctcccaaaacagtggccctcttccgcactctcctcccataccgccagaaactcatccatgttcgttggagcggggagggtatgtggatcccattaggagaaactgatttcggactaccgtttgagaaccatacggctcacccttctgcgggtcaaattctgttgtatcctggtggtatctccgaaaccgagattctgttctgttatggaggtgttgcctttgcaagtaagatgggaccgctggcggcaaatcatttcttgactatcgttgagggaattgaaaacctaaaggcactgggtgagctggtgctttgggagggagcgcaagatattttgttcgagttggatgatgctgataggtaagtctgttctattgtatagactacgacctcctctcaatactaattatgtatccaaattctcgtataggccttgttctgcaaagctatgatattctactatcagtcatgaaagcatcccgtccatattcaactctgggaaatcaagcgactccccgaaaagattccctgcccagtcaacaccagaatcattcatcaaatctagcagagactggattgccatatcatcaatctccgtttcctcgatatgctgctcgttcttctcagagattaacaccaaagcaactgtatagtgaacaatggcttggaagtcgtgcgcaaaatggaatctcgtggccagagacacgctgtcgaagatgtctatcgcaaggaggaggagtcgagcgagaaccgaagaagaagaggagggaaggcgtgtacataatttccctttctcttgactagagtcttcgctgcaaatttgtaggttttctgtttctcatgttgtcagttattgatggactcagatcataaaatatctatatgaatacctcaccatcgatgatgccccgaatatagcaaagacataagaatatgatagcgaacgtatgcgaaatccaggtcgagtccaccgcatagtataatcgactcacggatgcacgatccacattgtatgtcccaccgggaaaggtagatagttcctgcgaatccagcgagaagacaatatctggcttgaagctcgattgtgctaatattatctgcgctgctgcggtcaagctcactgaaagcgcttgttgaacatgtggtttacttaaatccgtcgatcgatgtacccgtggggaagaaagtagtggtgcaagggatgcacaattgagggagagtcggtaccactacatcgcaggttagattaagttcctgaataaatgtagttaggtaactgcatacccgggccgaagtgaatggcaaatgattgtaatgggattctgatttctctgatgattgttaattactgtgaggataggatgccaaatgaacgcacctaaacgagaaaaccaagatctgcgaaccgtcagtaagaccaaaaataactccaggaagattcacttgcctctcccaatcatctaaatcactattcaaccgttgcaagcaactcggttgcaatcgacggccagatatatccccagaactagacatagcaaggtgaactattccgacaagttccacaagtccccttacccgaaggtccgcaggggactgcatcagctcatgagagacaaacctccacgccacctgaaccgatggagtaggatcaattgatgcgggtagaccggatgtaagcatgaggttgaagttgcatgtgagcaagttgtaccacactcgtagctttttcacatcctctatggatggtaccttgtcagggggtttgaatagtgatgtggctgattgttcgaggcccagtagggcagagtatcgctctgctaatcccaagacaacccaagcactgatttcgttgtaccggcttttggtctggggttcgtcataggtacttgggcgcaaggaatcctcatcttcaccctctttgctgcatggcatccactgggcatagagaagaagcacacagatagaatctaaattgacatctgatggggtaggccggagtaggagcctggagaccgctttgtcgagtaattttgtcagatcataaaatcggggatgaccgacaatagaatcgtcactgcacacgagtattattagcctagcttttgggtctagaaattttcgctcacgttcgatcacctatatcccagaaccgggtaccaactgagcatattgtcaaaataagtgttgggcttgtttgaagatattcatgccatgtatcccgaataccttcatctaatacaggcgctgagtgatggcaatgatcaaagaatctgctgaatatcagtaggtggcatatttcccagatggagttgtagaatacatttcaactgctcgccggacctcttcggctgtaaggagcccctggtaaataggatcgtacatgttcttgtatctctgcgctctcagagttgactcatcaactctctcttccgcaagcactcttaacgatcgcagtgttgcgataggaggacctagatggattccgtcgatttctgactcgggagaatcatatatgttgctttgacttttcgggagagcttcttgatgctcaggctgaatgtctctgggtctttcttttgtattgtggtcaaatggactcttctgattttcaagctcagatattcgggtttcatgttggttgagtctgcttctggtcttagtgtctgctcttgactgggtcgcaattttcagtctcacctattttgaagttcaataaccagttgtactagacccgatggactttgagtcaggtccaatgttggtgctctatctgtctcaaatgaacaagtgatgcttagtctttgacatcgcttgcatggtaattgtagattggatacgtcggatggtaaacatcgctgttttcgtgtgtgacactaaagcgcctatattaagtactgcgtttctatgttgaacacgcaatactcacttgtagacaagcccgggcaatccgacgcactttagcagggcgctcattatctgtttgattgtctgaccaattggcattgaaggacattgctgtttggtgtttgaacaagaagaagacacatcttagagaatcagatcagaaaaagggccaatctggggatatttactctgataacatctcggacgctgatttgctgccgataccctcagtgttgaggctttcatgaaagtcttatttatgggcctcgcggcttatttgacactttaaccttaacagaagtgcctgtattcgagttaattgtgtattccgctgggattcgcagagtacgtactcagcatatataatctcagctcctgccaactcatcctctgtgaatgcattggcaagagattgggtttttccatctttgaccccgatacaacatttgctttaattcgttagcgaccgtgagtctgtcaaatcaccaaaagccccgtggctgatgtcgctggcagtcacaactgtcgcattaatcacaaccaaatcaaatttaggccatactctcaatagtgtcagttaaaatttgggtgtcgcattggcatagtaaggcacaacatgcggcacgcacggctttctagccgactccatcggcttgtgccgcttatctggccacaacgttgtttgagatataggattctatcgctatcatttgattacgaacaatatcccgataactatcgcgttgctaaatttccttatcgtcccacaagacacgttgtgctaggtttggtaggccttacggagtatagttcggagaaactcgatacagggcccactacaacttggggagagagacagagacaatacattcaaattgaaagaagcagattgacaatgtatatagcaataaaataaggttgtcctgttaaacacacagagtcgacgcgagagaattatgatttagattctgtcggaaatcttctgccacagattctgggcagtttcctaggccaacgattaattatatgaaaggtttgggttaagatgggactaaccttctcgataacctcgctcgaagagccggtgacaaagtccatctctgcataatcgaccatctttgacttggtccagaacttgtatccaaagaagaggacggcaaagaacggaattggaaagtaagtagtaacaaaagaggaagcgtcaaagctcggcactttgaaggagatcagtaagtggaagaggtgcttcatatcttgcgaactcactgaaggaaccaaacccgccgaagatgatgaccataacgcaaattgaaattccatctaaatcgtcacatatattagtatctccgcacgaaatagagaatttggaagctgacagtatgaaagatatggttgaagaggtgccatatatgggagtgtctttcgatcgatgccctgcgccttgagacctttgttccaacggatgctggtccacaagatccctgtccaggagatcataccacacatcgcagtcatgttagagactttattgatgttagcttcatagcctagcacggatttcctcaagatgtccactcacaatagccaaacactgtgcccgcttctccatgggcggcggccataaatgagaggaaagagaaagcaccacagaaaagaaagcagacccaggggaacccatctgctcgagttttgagaaagatctttggggcatgtccacgggttgctagtccgtatagggttcttgatgagacaaaaagatcagctgtaccggcagaccatgcgctggtgagaagggctgcattaataatggaggggaggaccgagatcccggagttctatatatgttagcttttcagccctgggtaagggtttgcacggtgaattacctggatagcgataacaaagggactcttggctgcagtagaagtaagattgagagaagggtcggagggagacacgagaagtccgatctgggattgtaagtagactgcaagtaatcgttgggttttgaaacttaccaagaaagcactgcagatatagactggattgaagagaagggaagttagtgaattgacgtctgggaaacaaaatagctgagctcacagagtacaagcctaatccaaacactcttgatggctcgcggcacattctttcgtggctgtaatatgatgtaagtgagaggaactcgcgatcgggttgacaaactctcacgtttgaagtctcagcagctgcaattgccgtaatctcagatccaatgaatgcgaatgcagcattgatcaaaactataaaccgatgagttattcggtacgagctgatagttcgaaactggtctcaccgctgaaaaatccgaggaagcgtcctttcgaaccggctttattgaatgttagataccagtaagtgggtattgaattgatcgacttaccaattccttcatactgtacgaatccaccagtctcgttccaatatttgaatccgattgcctcgtggttaggtccgccaccggcactaatgataataccagtaataataaggccaatgatagtcacaacctatatcaaatgtcagttctctccatttttgaggctgcgctctttttatcttaccttgattgaacaaaaccagaattccatctcaccaaagactcgtgttcccgcatagtttatggcaaactagatgatcatcagtatcatttgtagtccaattctttgcacaaaagcataccacgacgatcagcatcagcccaacccacatggcattattacagattccagtagagcatgtagaatctgtctgtccggccggagtccaaaatgtgaccagaagagccgcagcggaaatttcagccggtaagacaactggagaaatcagttagatgcatcctgctttcccagaataaacaagaatagtcgtaccaatataactaaagcatttgtcaggccaggttctcatggttcagaatacaacttcacttacttataccagaacaggatacccatagcaaatccaagctcgggcgaggtgaaccggccagccaaagcgaattgaccgccaggaatgggaaattgcgatgccatctcaccgagagcaacctgcggatggtcgtcagtctttttgggagatttgaaagcgtcggcagttgccttaccattactgagtacagcaacgaagccataatacagtatccaataagaagaccggctggaccaccatgctggagatcgctcgctgtgcctagaaagaggccagtaccctagggaatcatcagcatgaaagtgaattgagctgacagtaggacggatgactgacgataacacctccgatggcaatcatttgtctatatcgaatcgtgagtccctatatatcaagtcccgcgtgtggcacttacagatgccgtggctatactaagttttagttcatccctgttgccatcaaaaaggtgtggctcgacgtaccctgagctgtcgttggagaccatgattgctacctatgtcttgggtagttcccatgctgactgggacttcgttggcatcataagccatttctttagttttctgaaatgtaggttaatataaaaaccatggatcttactcccaaaggaggtatatctcacgtcgtgctgcatattgttccacctagctggttgtcgatgaatgaattactttcgttggaaaaggattggatgatcctatatacatatgtgattatcaacgccatctacaaaaacgccacatgaaggttaaatcaaacttatcttcgagataaggctcttacacggttcatcaccgtggcgtgcgggtcgaaccgagatttcccgcgcctgtcttatcagcgggtagagaccgatgctcccgacgctcaccctcctcaaaggtacgagggatcgtcaaagattgaatgtttgaaccaatctgaaaatctggaatttgactttgtggcgactattcaagtgattgctatctcaaaatggcatattctacacggcctctacggccgggagtatacgtgccactgcccacgttctttgatgaacaccaagaaattgactatgacagctatcggagacatctgctaggtaagatagggctcttattgaaaattaccaatgacatgaacttatctgacaccgatcacagctatggtcactcgcggcatgggtaagttgtttgagcgtgtattatgaaaccacatattaatgggactccgcgttcagtaccagtatgtgctggatcgttaggggaggctgttcacctggtgagtttggttctttcctatcatgcctttagatagtactgatggtcttaggatttcgatgagcgtgtatcccttatccgcttcatcagggaaactctggatggggcaggattgcaatctacccccatagtcgctggtgtaggaggactcagtaccagagaaactatcagtctctccaaagctgctgccgatgccggggcgtaagtgaatactgaattccggcgattatcttccttctaacaatgacagagatgcgggtatggttattttacctgcctattatgccgcgagtctgaacacagacatggaccaagtcattcaatactatgtggatatttgcgaagcatcgccagtatgggttgtccataacgcactaactgcatcattgctaatgaagtgatagattcctctgttgctatacaacttcccatccaacgctggcggccaggatatgtcttcagaagttatcagcgcgatcatgaagaaaacatctaacttatgtggagtgaagttgacgtgagtcttagccttcttggcaactctcattttgacagcgctgataagaacagatgcggtggaagcatggggaagctgatccgtcttcaagccctgatctccgaagataccacaataaatgagactcgcaaattcccatttcttttactggacggccttattgctgatctaaccccctggatgcaatgtgctggtcatggcactgtgagcggtattcctaactttgtgccagtggcttctatgaggctctggtcactactgaacttgccatccccaacagagacagaacgcaatgaagcgagaaatattcaagcgattcttgcgcgggctgatgctgctgcggttccaggtggtattcgggctatgagtgagtatatccataaagaatttcgagggtactaggctgattacatgtagaatatgcattgaacaagatgcatgggtatgggattgctccgcgaagaccattgcttccgttgggggaagctgaagggggcgagtttatgaatgctttgggtgaggcaatgcgacttgagtctgaattaagagaggcaacgtcaactccatagcatggtagtctgttatcgcgactatgttggaccaagtgtcctttcttacttcacctttcctacggtcgttgatactctttgtatatgtagccaatcaatatctatcggagtattatggagtatactaaacgttgtaattcttattcatatcatactaaaagtacgaaagaagcaggacgaaataaacaaccaggtaatacaagcaaagttcttttagtcccgggaattagcaacgtctactcactttctagctagctacactattgataataggaccaccatctatccatacatactaattttcatcagttatcaagtttcggttaattagagctttaaatccaagggtcattcttagatacaatgcactatgctatggacgatcaaaataactttgccccaaactcttcaaaagcctgtcttcaaaggtccgcctgttccggaactgggctctttagttttccaacttcaagagccatacggatgttctcaattgtccattcttctatggcaagaattgtcttttggcaagtcagtctcacaccactacttatggggaaatacaaaactcacctcactagtccaagtgcccatatggggaaccagaatcacattctggttactgagcaacccaggatgaatccgaggctcttcctcaaagacgtcgaggccagccgagaacactttaccactatctagggcatcaaccagagcagcctcgtccatgacagcgccgcgggcagtgttgaccactaccacgccgtccttcatcttagcgaactcagctttgccgataatatggcgcgtgtttttcttcaagcgattagtatcataccacatctgcttcccttttggaacaagaaatcacttacattcaatggcaggttcaagctgatcacgtcactggtggacaggagttcatcaaaagaaacatatttcgcacccgctgacatctcatcactgagtctgcggcggttatgatagatgaccttcatcccaaaggcctctgcctttttcttcaaattacgtccaataccacccattcccagaatcccaaggacctttccctggggatcatggccgagaggaggcgccgggtggccacgccatttaccctcgcgcaaggcgttcatgccggtgttgaagttgcgcaatgcaccaagaatcaggaacatgttcacgtcggcagtggcatcgtccactgcagttgggacattggaaaccagaatcggggggttgcgcgcactgcaggcatgaacgtccacttggtcatatccggctcctatagatattgcatgtcaacatatacatatttgagcactcatatcataagctcaacgtaccacaatgcgcgatatatcggagtgagcttggtagcacattcactagctcctcgtctacaagccctgtttgactcaaagaccccattgttcggtatatcgcaacaacaccatccagcttgccgtctttgcactcttggatgaactcggctcgggtggtcgccgctgactcaactagctgtgctacctctcccaatgcattccaggctgcctgtgcactgtgtttgaagaatgtcaatttcatgaaatggatatcaatggtgcgaaaggatggggtgaacgtactagtcgatacttccaagacgtaggaccttgggcttggggccagtagaacccattccgatggtattaagggcagttgattctgtgttgatccagacaattagcaatttgagcagacgaggaatgtatagcaatgctagaacattaactctgagtcaatttttcaaagattttccctccagttttacttcgggtcgaaataccccgacgccttttcttgacatatttgaacttaccgataagcaagcagtccgatcaagatgataagtgacttagttgttgcaaaagaggtttgaagacacaaatgaagtcaaaggaacaagagacagagatattagacaataagagtcataactatatatattttactaagcatcggccgagaagcaaagcaagtgccctcaactgcggaatacctaaccgacgtcagccatcggctcgattgccgatgtcgttatctgttgacacactaaaatgctggccatgagtggtgcttttattctagtccactgtgatattgtgtggaatagaaaacatttcgagaacattggagacttcgtgttttcaactttgaaatggaactcgcgacggttcgagtaaatgtattcagccagatgtgtactatacagtgcgtcaaggggctatttccaggctcactagccttcaattagaatacgagtccagtcaaacttcttccagcgctttctgaatccgtcaaccctgcgatctccacggttccagcgtccttgtcgtttgataacgtccggtgcaacatccagcattccaccgatgatctctcgggcaaagagatctccacgaggccagcggttgtcgtcctccacaatatgacccaggccaccatctagttcaaaccaaacgtggaagtagggcatctccttcacaagggttcggcggaaggcagaccggcctaacccttgctttgatttagcaagggtatcgataagtttgcggtgctgcgaccattccgactcggcactgagaattgcctctttgaaaaacgcaggagcggtttctcctagactgtagggtaaaggcacgacttccatggatgcatgtcgcttgcgctgtggctgggctgcattctcgtagaagatcacatctcgaccttggtcgtggtacatacgcgtgagactcttcataaagttgcggatctcttcccactcgtcgtcatcgcattccatcaaattagtgcgatgttggattggtacgatagtagcacccccttcactgatttcgggttcggtaggaagtgtgaggaagaccctggtcgcaagggaaaccactggggcaagaggaggcgtgcccttgtcttcgttgtgacaaagcgggcagttgtccaatatccggttcatcttgtggaagtcattgatcgttgtgttcttgaggtcaatctcagatcgatgaacccttttggccaacttggacgcattgtcatccatatactccaagtcgttctatacattggttagcaggggaaacaggagtcatcacacataagtctaggactgacctcaaacttggcatcacggccaatttgatctgctaagcggcggccttctccgccgagttggccacgggtcttgcgctcttcgcgcaccatatcttcaatggtcatatcttcatttgcttccacctggcctctttcccggcctctcttagtatcgacagctttgacctcattcctagagcctgctagcatcgggttatgcataacatcaaggaccacaacatcggactccttgcggtttgacatagctgccgcggctgtattgtactgttcctcgagatcggcggcatttggtgcttttctgagctttgccttcatcatctgggctttgagacgattcagtgccgtcatatcgaggtgacgggtagtgttcggaggaggcacagtgtccattttcttgccttggccttcggccttcagttcctgctctggatcacgaacatgttcgagtggacctcttcgaatatcattttggagtttcctttcctggaacagctcgccactaggtttatctttgcccacataggacttgccatacgttttgcgccgatcaatctcagtttcctcctcccgagcgtcgtcaaaggagcgaaggtctccaaaacgctcagtagcaatatcttcaataggcctgccactttcctccgcctctctgtatacacctttgagtttggtcattctccattgtgaccccgaatccccaaaagtatagtccacctcgtgctgagcaggttcatcttctatatcttcgagtgtttttccatctttgagatcacgaagatggtcgttgagctccttgtcatgaatcttgagttcgtagtccgccgaaagcattattggtttcggctcctcctgtcgcgtcgaatccggtcgatgaacatattcaacgtcgagacccgagggcgcttccatccaggcgtcccgtttgagattactgggctcttcctgtactattaccggaggagcggtggattcgccctcatctttggaattccggtgatggcgtttatggccatgttcgtctccttggtcgtcggaacgacgtgaacgcttgtgtcggcggccatcgtcgtcgcgatgcctggactcgcgaactcgctcgctgtctcgatcgcgagatctggaggaatgccgccggtgatggtggtcggaatgatgacggtgttgtctcgagcgctctttgctgcgatcgcgatcgcggtttcggtctcgatgatgtcgcccttcacttttctcgtgtcgcggctctttcccgtctgccaatgatttctcaaaatcttctagagtcatggtgttcctgatatgtggaaaagggatgagaaaggcaaaatatggaatgacgtttataaaatgccgggcggtccaattgtagatctttccccgcgacaaaaaagatttcgaacagaagagaagagcttatctttcatcacttggcttcttgtcttccacccttgaacaatacataatcgactacagagctctctgtaattttattcgcttgatcgagtctatctttctataaacttccttcaccatggcatctccggtggccgtggtctgcgtgggcatggcaggtaaggatgctgatcgcccctcacctatctacaacgatctaatcgtcagtgttatggattgaataggctcaggcaagacgaccttcatgcaaagaatcaactcctatctgcatgaaaagaagaccgtgccgtatgtgatcaatctcgaccccgcggtgcattcggtacccttcgagagcaacatcgatatccgtgactccattaattacaaagaagtgatgaagcagtacaacctgggtcctaacggaggaatcttgacttcattaaatctgttcgccaccaaagtcgatcaaattatctcgctcctagagaaacgcaccgccccgaaccctgaaaacccttccgcaacaccaatcaagcacatcttggtcgacacacccggccaaatcgaagtctttgtctggagtgcatcgggcagtatccttctcgagactatggcgacatcattcccaacggtcatcgcatatgttatcgatacgcctcgcgcaagctctaccagcaccttcatgagcaacatgctgtacgcatgtagtatcttgtacaagaccaagctccccatgatcttggtcttcaacaagactgacgtcaaggatgctgagtttgccaaggaatggatgaccgactttgatgcattccagcaggctctgcggcaggaggaagacgcgggggcctttggagctgagggcggtgccggtggctttggttctggcagtggatacatgggctcccttctgaacagcatgagtctcatgttggaagaattctatcgacacctcagcgtcgttggcgtcagctcaatgaccggcgatggtgtcgaggagttcttcgaggctgtggagacaaagcgacaggagtttgaacgtgactacaagcccgaattggagcgcaagaagaaagagcgcgaagagcaatcatcatcccagcgggagcttgaacttggaaaattaatgaaagacatgaatgtgtctgggtcaagccggcagccgccgaggaaatccaccgaggagcctgagactgtcagtgaagccgaagatgaagaagatgatatcatcaagcgtggattggcagatggagaagacagtgactatgaggactacgtggggcctaacgctggcaatgatgagggtcttactcaacgttaccaggaggctctggcaggctcacaaagtactccatcagagcaggataacagcttcacaagatatctgcgcgcaagcaatatgcaacagtgaagcaatctgtcacaaaggggtcttacttgttctgaataggctcggcttacggcgtttgtggtcttagaggcgcatttcattatatcaaagtaatcaaatatcatcttagtctattttgtcttcgccttggtatagtaacacataccgggtgaacctttgcaaacaagtcaaacggcaatgttgctgtatgacgtcacttgctcataatgcagcagccttaggaaatgatcgcccagaagcttcatcttctccccatttctgatacgagctacttcaatctcgcgagaatttcaattccattcgaacacatactagcgaatttccatcatggatgtgagccaatcctattactgtctccaagcgtcggaagatagacctcgaaaccggagccaaaagctaacttgacaggtctttcgcgcctacacatacacgacagccgcatggctgtcacttcagagtctacctctgatagccggaccgagcatgatagtgaccctgctcttggatgagactcggcctgcttcccgtatgtggcctacctcctgaatgtgccgcgcgcacccgtttacgagccatgctaacctttcgcccttgaaaagccattgaactatacttcgcccggtgtttcggcttcagtcttctcacaattgccgttttgaccatgatgctgaccggctccatccccctgacggccgggatcagggagtctgtgtcaacagaggacgacgatcccaaagcaccatacgctgtgccaactctgatggtgacctctgttttccacaccacatgtgcattttacgcgtacacctggtatgtttccggtggatcgggtatctttgctgttggtgttgctggatactctactattgcggccattgggttgtggtgcatgctctttggcagcagcaatggaaggatcagtcgccgtaacggtgcagacaagaggacagcggggtttcctttcaagaactcggaagcagcgaagaaacataacaagggtctgtaagctgccgaggctggaatcaacactgcatccatagattcaatgtgaatatcgtatcccagtgttttagtagaataaatctgctattcatcattaattccaaaaagataattcatagaagccgttttttttttgtacctgagatcctcatgatgatccgagcttcccttaaccccacaatgccgcttcaaccgtccttcttctcctcaaaagcagcacgcctctccacaactttatattgtttacaagatggactctgagctacgactgtcgtcgccccgcttaggaccttcaatgtcaatgaatgatcagtctaacctacagttaggccaatttgacccggaatcgcaacccttcgggccattccgtcccccgaccgaaactgaatcacagctccagaacgcgacgcatgcgtttattcgtcctccacgatcaggcgagtcggcgaataacttcatcactacgtctcaatccacacagcagcacccaggtcaccctagcaatggagttgcctcgcacttacaaccgcaagggcaatcctgtggtttagatcaatcgcaggactacaataatggcgtcgctcatgcagcgaatatgagtggggcattgcatggcgctactgctggacaaatggcacctccagcatcgctgtctcaaaacgagctagcgatgggaaacaacgcgcatcaaactcagaataacagcttaacgctgcagtcccaaggccaaccgtttcaaccagacttcatcgagctggatactggctccacggattcagtggccttcaatgggcccggagaactgcaaggcttcaaagtggtcccgaaccctccaaatctggattactggagagataggttattcaacgtcgatgaaatgatcaccctaagcgaagaggagtatgcaggctccattgttggaatgattgataccctactagaggctgactcgcacatttctacagattccaaacctacttcccccacgttgacaatgtatactctcatcgctccacccagcggtacaagcgtaaacccttcgtctcccattactgggactgtcgactcaaaggacgaccacccggaacccccaaatccgacgacccagaaaaaaagaagcgcaagcgtacggccagagaacgggatctctgccatgttaaaatcaaagtcgtggaatacttcccagtgtccgaaatatcgaatttgcccgatgcagtcgagcccttgccatctaacatcttacctggcatgtatactttctctctgaatgacgactccgcgatccgaaatgtccaaacattcggtatgctcacgcccaatcctggtctaccaccaaatcacccgggatcgaacggtggaagatatttcactatacagcgggtgaatggcaatggtgccaacgggaagaacgacggagtgagcggcggtcatcaacatacgcttgaagaaagtgatcgtgtcaagaaaagtagtgtgcaacgatacattctgaaggaaaagaaagataaaaggacgagagcggtatgttgatcctgttttgttgtgttcaattgcacaagagtatccccgccggctacgtcacaagtctacattgacttcatacttcccacatgcgaaagatcttgtctcatccttttgttttcatttctatcatttttaattgtgcagatttaacacgaaatacacaataggaccgagtcatgtctcgaccaggccaaaaatcataccatacaaaagcaacgggtctggccgctgaaactgcgatcaaacactctgccgatgttaatctcaagctatttgggagctgcttctggtgagatcctcccaaatttaactgttctgacgaaatcttgttgtgtattgacttaacctgcatttgtagcccattcgtgcagcgggtatggatcgcattggaactgaaaggtatcccgtatcaatacatcgaagtggatccgtacgaaaagccccagtcactgttagaggtgaatccaagagggcttgttcctgctttgcgccacgacgactggggatgctatgaaagcaacgtgttgttggaatatgtaagaaaccccgaggagccaatttctcattttcctcactgatcaatcccttgcagctggaggacctgggtgtaggggctgcaatgcttccagtagacccaaagctgcgcgcccattgccgattatgggcggatcatgtaagtagacacacaggtctgttctggatcatcgctgatagccctccaggtcaatcggcatatcgtgccgagtttctaccgtatactgcaagagcaggaccaacagaaacagatcgagaagacacaggagctgcgagatgcgatggagaagctgctcgaggtagcgcatacttcggggcccttcttcatgggcccgcagatgtcccttgtggacgttcaagctgcaccgtggatcattcggctgcggcgggtcctgaaaccataccgaggatggccagatgccgaggagggaagcaggctggccatctgggtgaatgcaatcgagactgatccgcatgtgcaagcgacaactagcacggacgagttgtaccacgacagctatgagcgatatgcccgtgagtatcgctcccatgcctttttcaatagcattgctaatgcttcatgtgacagagaaccgtccaaatacatcccaagtcgcaaatgcaattaacgcaggacggggcctcccttaataccagaacaacgatatctgatggcgtcctgggacgaaaaggtgttggccaaatgtacattagcctgttttagcacctcgattgaaattgaatccacccctcccacttgcatcagggcctcgaggactgcgcaccggctgctgtggggcttgagtgtcggagccgcttcgctcgacttgcggacggccacctctctgtaggaagggtgcattcgacttggaagtagagggatcgtagagatgtctggacttgctcgaggtcgacgaggagtctctcttctggtgatctcttccgccgccacgtccttttcctctgaccctgccctcgcctgtaggggtttgacgaggtggagtcgtactaccgcccgacgaggtacccgaggctgtagcagatgggcttccaaatagacgttcgcgcacttcttcgtacttccgctgcttctcctcccgattcttcagtgcaatagcatggcgctcctcgggtgttggctggggcggcttagtgtcatcgtccgagtcgtcatcttcgtctagtccgagtcggccaaggccagccgttgcggcactgattgttcttgaagatgatgaatgtcttgtcacaagctggggtttccgactcagtagtgtaactgcgggcttgaagtcttgcttaagaggaacatcggcgcgcgcttcgacgaagtgaaatgtttctgcggattcactgcaacacagttcagtctcttgaacaacccaaagaatgacaaaagttaggtggcgattgaaacttacgcttcagcccatagctgacgattgaactcggcctgttccgccctgcgttgcgccttggtcaccttggatgagactttcttctcggctggcggggtagaattggagtcgagtctctgtaaacgatgacgatcagcatgccaccacagcttacaagcattgagtagaatttgatagcagactagtgtctgtcccaaatgtcacataattccctgagattacatacatctgcttgattttcccaggaatcctcccaggcatcgggaactgcaccggagtttgcgctcattgcactcataatgacggttgcaggattaagaatagagaaggatactgaaaaaaagaaggacgacaatatgctaaacacgaaggctagcaataactcgtatgttcatgcagcatataaactggggaagaaggaagaagaaaattcatgcgagccccggggccaccgcctgtcgaccgttgatctctccactccccgcgccctgaagtctgagaactttcgaaactacgaaaccgaccatcgagctcatttctgctaattcccaacaatggcgattggtaggtctctcctattccctcacaagctacacgatgtagccgggcacagtgggccccgcgatatcgatagtgctccatacccacatgtgcaccggcctcttattccatgctacaaactagagactccggggttacatctactaacaaacaccttctagaccctagagacccagacggcgactctaccatgacctcttccgtcgattccatccggcccgacgacggcgctagagccggcgctcgcactccaactggcaccgcccaagcttcctcggccggcgttgacgtatcggagctttcccctcctggctctcagacaaagcaagaagctggagtctctgctggtggcattggggctgcgctggaacagcgcggaggagagtctgcggagaaaacggttgacttaaatatcgcggcgtggaagagcaagcgtgctcaagaggaatatcagcgtgctatggagtatgtcattgataaagatttcacgctaggtatgtggctttctatatgtacttcgtctggctgggtggtttccatccatggatgtctgtacagtgtgctgactggatgccttgtgttcagatgaattcggggatccttttgatgaacgtgacttagcagagaagttgctatgaatctctgcatgtcggagaccatctactacctgggcagcatagatatgaataatgagatacgacttgattatttagcttgtagttcttttagtacttttggtttacgatgagctggcggtcttcgctcacctatggtgacatttgtacgcggaattgcttcgaatcactgctattcaacgtaaagaaaagctgctccaggctcattcggtgcgatctacaagtttcgttgcctactacgcttgtagatgacttttccgaaaagacatcctatacccgagctttagggaaaatatatgtaggatatagcaaatcctcagagccactatatgattccaattggctttttttctatgcttttgtgctctagtattgctatttgtagttctcagttcgtagttagtagcttgctagtcggtgaagatatatagtcaagatatatatcgaattatttactccgtactatttgatcgctggcaaggattgcaattaatcaacagacgtcaccacaacctccaatgaaatcccatacattcatgctatgatcgcccgatctccacgttgggctctcccatgcagtggttggcagggcaaccgggggaaagacatcaaagcaaaaccccaacggcccgcttcatgactttcacatctatcacgacaatccgacaatccgacattttactgaggggcaggctcagttgcatccttcgattcacatttttaaagtagatgacttgccttgattcatttaactcgaacatacttggtccaacatttcaacagctttgacacattccatacgcgtcaacaatcatggaaaaccatcctccttcaccgcaggcatggtaggtcaattgtttctttcttgctgcttttggattcaatcttttttttcttctttcctttcctttgtctttgaatgatcatactcgcctgtcgctcaggtgtttggtcccttttcccctattttgagccagaccgctatacagacttgagactaacgcaactgccttacgcgctagcagctctgccacaaattccactgaaagttccttcagtttcacgcctatcaaagccctgagcgccttgccgcgactgtgggatcgtaaaccttctacgcctgtcagggcaggagacaaaacacgaaagctgtggaagcgcattcgctttccgtttacgagcatggttaccacgacagaagtccagactacgggggtcggcgcctctaaaaactcagattatcagcgtggcgtgaagcgtctgtgtgttgattccaccggcgtggaccaagacactgaggctgagcgacgcggtcggtctttccttgagactaaatgggagatgcaggcatctcgtaaacgacgtaagtttcttcctcgattatgggggggcatctgcacatcgcacgtggcatcccgtgctcctgcatttagaaagacctttcatctgataatttgcaggcaaaatgcccgaattcgatttcaacatccacgacgagggctcccaggaggtgtttagtttcactgcgaaccagcccaaggagacgcccaatgatgctgtcggcgacgtagctacgaatgcggcaccccagtcgctcagcgatctgtggaagacttccaagacgccggtctataacgatgccgtggcgaccgacctaaatcttactgcatctgacgcgaagacagcgcaggatgtgcagtctagatcatgcagccaagacgcgccgattgtgatcgacaatacaggagtcgacaacaccaacttcgtgtccaccacggaatccgtgcaagcactgacgcaagagcaggaggtcaaattggtacgatcggcactgcgaagctccttggatggagagaatgcagagctgctcaacgactttctgtccagggcgaatgcgaaacgggccgccaaggccacacatcccggagatgcgaaatcaacggagatgggttctagcccagaggagtctccagaagttaaatgctcaacaccgccaccacgccgcgtgttggaggaattgacaaccaactcaccttcacccgtcaagttgcagttctcgcctagtaaatatgacgtcaagcgtggtgccgatggtgcgggtgagcggggggatattatcaccaaggaggatatcattccgaaagagatcatgggagaacaagctcctgcaagccctgcatgtcgtcgcagcacccgtaccaaaggcgtgaatgccccgagcatgcgcaacacgatctcattccgccgagccaaaggcacggaattcgtttttcaacagcgaactgagagccagcagatggcaatggccacaaagcgcaacacccggctcaacaaaggcaaagctgtaactcctatagtcattttgcaagcgctggctcaacagccgagcgaggaagagctgttgccatgcaatttacaaaatgagggctcgagccaccaggacactaacaccggtgcactggctaaatcgcgaaagcaggtgtcgtggaatgaagagcgcatggccgagtatgaagaatacagagagccaatggacgaccaggaggatgaagaggagggcgatcggtgcacgaatgacgtgggcgcaacgcctcgcccgcaagcagaaagcaagcgctcagcgaagaaagcagagtccggtcatcgcagcagccgtagccaaacgcaaaaggccgacgcgaatgcagacagtggggccaccgcgagcggttcaaccccgactactgcagctgctactgtaaccccgcgctctcgccgggtgaggcgtttgggtgattcgggaattttggggtctggacccccagttaagactgcaagtcgcagcacaagcaagcctcctgcagcctcgtctattgtggctgctgctgccccctccacacctaccaagggccgccgcaagcttactcccaagtcccccattccctcaaagcttcccgcacgagcctccaagagtgccaacaccgcggaccagcctttcgtcagtgggatccccactcgcagctcacaaagcacagatgatgcacagcgacagagtatgcttcagatgagtgccgggtgtacgcccacggctcggcgcgttcggtcgagatattattgattggatatgcattctcattggattacgactactcttctgaccgttctataccccggttcccattgtgacgctctttatttatcgggggagttgctcgtgttttaagataccaattgctgtttttttttctttatttcatgtatgcattcttattgaatttgtaaattgttccctttccttcaccttcatcttgatcaagataagattcgctgcacggttcacctgctttatgcaaaatgacgtctgtgccgtcgcgccccctcggctgcccctcggctgcccctccaaccttggaaccttcgggatttgtctgagggatggaatttccaatctcagaggttgtgctgtcctgttttcattcggactacattcggactacgatcttcgcgttgaaaccaatattatgcacctaaccgcattgacaagctctaatagtctgttccgttgatccctcgtgccagcgaatcatacgaagtactccgtatatacggctgccttccaaggctgttacctgtactgatagccgatacatgctgatcgttgttctggtatttgcaaattgtctctaaaccgagctgggatttgcaatgtctttcatacaatgcgtattgtagatgcagttgtatctcatatggcgtcctcgtcgagcctaccttctatgttgtagtacgaacatgtccaatatgaagattggaatcctacaccagactgctccaccccaatgatgcagtactccatatgctacccactccctattattgaggctgggaaacaagttcacaatccggctatgtgcattccaatcctccgaagttcctccccatcggctcgtcggtcaacccgacccaaaaggtctcagattaaaaagtcaaagagcgtttcatagcccaaacaaatgcggcattaaaccccatacagaatcataaataaatccgatcaatcggcccaatggaaagaggaatgcacgtactccgtatagtacaatacaacatacatagatactacctactatgcacatgcaacatgcatacatacggagtcctccccgtacctataactataaccatcacacccgataaaccaatagcgaataaccccccaaaccgccaagccccattccaacgaaccacctcgggaccaccacaatcaaactatccccatcaactacccttaccctattcggcctttcggtgttagccacaagcagtatgccatccgactgtaatctgtaatctccaaacatcacacccgccatccgatatctcccggtggtgtggtcggtagtcagcaacgctaagacccgatgcggtaagtgcgcgcacaactaagcgccttaagtggcgcatggggttccgagagccacatgggtcaacgcgagatgacatcgtctgcagggctcggagcagtgtgctccttgctccttgttttgcattttgcacatggaaatgaaatgggagtggaattggaaatgatatccgctttttagggttgtatttttggggttaggccagttaaatcagttaaacaacttacaacatacaatataggttgtactatgttgtatacgatggttgtatggtttgttccacttggctgcttttgtatcgctatttccgtcttaaggtgttggtgttggcttggctttggcccttgtcaggtacggtgtaaccctactttggcttttggattatttttcttcggggatttaattattggttggaattgttaaggtgtgaagaagacatagtctatgttgtatactaacactgttacaacggggtccttttgcaaattttgcattttcggtactccgtaccaccttccttaatattgggtaatcttcccagtccggtttgactcgccttgatggtggatttggggcgggtggttgtggcagccggtgtatgagattaagtggtcagtgtcagatcaaatggaagaggcggctcaaatgatacacaatctacagtacggagtacagctgaaacacagtaaacacaataatagagtaagatcatggtatgtccaattcatctgatagagttcgctagtcctttcattaactcatttccacccaccccccttggggtattgctcggggggattattttcgtctttttgtaagatggtcaggaccaaatctagtctttgtggggcgcagtgtgaagaggctcctcgggccagttgttgtagccgaaggtctcgtgcatgttgacgaagcgagtgtgacggcccttggccaccgcattcacagcctcaaagtcttcatcggcgagctcaatggtctggaagttggactcaatgcgcgccgggttggagctcttggggacgacactgtatccacgacgcagaccccaggcaatcaggacctgggcgagcgtgtggccacccttcttggcaacatcgttcagggtcttgttctcgctgacccgctcgcctgtcgtggggacctggttctgcgagcccagaggcgagtaggcctggggcaagatgttgtgggcgaagcagtactccaccaaggcctcgttgggcaagaaggggtgaatctcaatctggttgagcataggctggaccttggcgtacttggccatggcttcaagctgggggatagtccagttggacacaccgatggcccgggtcttgccatcggcgtacagcttctccacggcgcgccatgtctcctcgttgttctcggtcaaatctttgaggatcacgtgctagaacgggttagccgggagctggtcgtgtgctttgcggggaaagctcttctcacctttccatcgggaccgatcaacggcttaccctggccgtccttctcgcaagcaataggccagtggacaaggaagaggtccacgtagtcgagcttgagacgctcgagagagttgttgagggaccagaggacgtcatcgtagcggtgcaggtggttccagaccttggtgcacacgaagatgtcctcacgcttgacggaggggttggtcttgaggaaatcatggatggcgtccccgacctcaccctcattgaggtagaaccacgcgcagtcaagctgacggtagcctaccttgagggcagtcgtgacggcggcgtaggtctcgcccttggagccctcgttggcgaaggtaccgaagccaacggcgggcattttcacgccgttggccaatgtgtaagtctttccagatgacatgattgcaatgtagttgttagagaacagaagggaaaaagtacgcagaaagtacgagctgttggaagtagaagataaaagtgggggaagcggtgttggaagtggggtaaaaggggttggaggggcagaagaaccttgggaatgggaattatataacactttttcaattgaccttggaattgccgtaacgatgcaatctactgcaacttagcccgacctgccctgttccacctgtcgatccaagccactggctctgatcatcctgctctggcagagtcaaagacaccatcgaatccccaaaatgactaaaagaaacgaaagcgaggacaaaaataaaaagaataaaagaaatcaaaaatcaaaaccccaaaaagaccgctagtaattttcaaagctccgtgcgatgacatcatcaaccgaaacggtgcgcttggcctgatcgtcatcggctccatcgatctcatgtcggcccacgggtgcactgcactccagtccaatcgtctgcccgtctcaggcctctctctacccactcggcgtgctgggttgcttcacattcggcccagcaactctggtcctggccaatcagcgtctttctgattttattaggccgcgggaagcaacacgtcccgtgtattgggtacctagcaagacacggtgccagccacgatgacgcaggtaccctatacacgcctgtctcgttgcgagaaaacggtccaccctatcgctcgccaaatgatgtcttgccaaatgatgacgataattcctaggaatgatgatacccggtgagtggatccttcgtaacctcaatggcaaaataccaatttcgtttgtctccattatttgcgtccggtatcagatatcgcttgtatatatactctcctgaactccctcctccaccacctcccttatcagccaattttcattccccttctccctttttacaacttcaattctttccttgagtcctgaatccagtgactcccgagtagaagctcatcccatccttctacccctctatcaaactctatccaataccttcatcatgtctcgcgtcgaggactctgacctcgcagtcgacctggctgagcaggatccccgcgcccaggatcctcagggtgccctctcccctcgggaccagcgtgctagctccggtctcgccatcccatcggcaggcggtaacaccgtcgagatccccgccacccgcagcgccatcagtgatgccgctcaattcatgcacaacttgagcttgtctccctccatgagggaccgccggggatcgcgtaactcctttggcacttcgctccctatcccccgctccccccgcatgtcccgcctctcgtccgtgcagcgcggtgctccctcagtctcccgcgatatcttggcctctcaggttcaggatatcaacaaggagctgactaccaaggcgaagaacatggcctttgctttcgatattgatggtgtgctggcacacggtaaccacgccattgacgaggccaaggtcgtcctcaagatcctcaacggcgacaacgagttgggcatccgcatcccccacattctcctcaccaacggtggtggtaagaccgaggaggctcgctgtgctcagcttaccgagattctcgagcagcccatctccaccgaccagttcattcaatcccacactcccatgcaggccctggcagagtactaccagaccgttctggtcctcggtggtgaaggctttaagatccgcgaggttgccgaaaactacggcttcaagactgtcgtgcaccccaaggatctcctcgcctgggacccctccatctccccctgggctactctcaccgaagcagagaaggccgaggccaagccccgcgacttctccaagatgaagttcgatgccatcatggtcttcgctgattcccgtgactaccagaccgatatccaggtcattatggatctgctgctcgccgaggacggcatgatcggcaccaaggccaaggatcccgtcgccacccgcattcctatctacttctcccagggtgatctcctcatgcccaccgagcacaagggtcttccccgtctcacccagggtgccttccgtatcgccattgaggctcagtacaagacactcaccggtgtcgacctcgagcgtgttgtctacggtaagcccgagcgtgctacctacacctacgccgacgaggtcctgaaggcctggatggaggagctccacggtgtttcccgtctgcccgataacgtctacatgatcggtgacaaccccgcttccgatatcatcggtggaaacatgtatggctggaacacttgcttggtccgcactggtgtcttccagggcaaggagggcgagaatgaccccaacagccctgccaacttcggtgtcttcaacaatgtcctcgaagccgtcaaggctgccctcgccaaggagctcggccccgacttcaagctcaagtggaaccccaaggtcaaccccgtcactcacggcgacggtgcctccgccattgagtaaacaattgatcactctgatcctttcacgctgaaacgaaactcgaaaaacatgtgatactgggcttgagaaggatttcctggcgtttcgtgctttttttcccccatatcatagacttcttttctttccatttctctgttaaggccttctgatatcctttgtcatgtcgatctggattatcgacttgatagactgatatttgctttcttttttttacaatgtggatggtcgatggtttcgacctgcttttttcccttttagactggattgctacatatctcatgtgccatgacgcgaataaccttttgttttgctatatcccgatactccaataccatatcaccagtttttatcattgatgtcgtcaattaaatattcttaatttgtattcctttttctagaaaactggtgtattccaaaagtttgattattccagaaaaagcactcattgacgacatggtgatgtattctccttagtactagacctcttgtggagggatcttctattatttcccacgtctatatccaggtctatccatggatgcgtgtagttagtattctttaatacttgacttttacacatgaaaacaagcgtcagaaacaatatatttacagagaataatatcaaaatccatatccgtcaaatttgtacactttcgtctagaccacgcctggaccactaatgtttcgggaaacctggaaccagaagaaaagcaacaactaacgtaagacatcgatacaaccgccagagtggcaaacaaatacccggcattatctcaagacacgcacactgtgagtcgggtaggtacacaatatttgagcgggcatgtatgtgcctcagcaacgaggtatcggacgagtttattgtctcgattgcgcgtacgctggctgagtcgttctttggagggcgttgtaagctgcagcctgcagttccacccatatatcataggatacatatttgcatacagagaacttttgcgggctcctttgctggtttgcttgttgttgtcagtaagcaattgaagagcgcatgccatatcatagattcacacgaaaaggaatccagaatccagctctactgattatcccacggttttggacgcgaacaagaaagcggaaaggcgcaaaacttgtagaggaagactagttatataaaggaggactatgacagttaagtctaagaagaccaagctcagatcagagcagttctgtgataaagtatattcagacccattgctcacccaatccgcgactatctcatcgccgtattgattgatcgaactattgtataattcaatgagaaaaacccattgtatatcctagtgtaacttacggatcggtcagacatgaaagacctgtggaataaagatagcgatccgtcataaatgtagctggctacaatttagcacgggagttgtgagatagcgactctaatagacgagtatcttactaggataagcaatcgaaccacctcgaaccataacatcggttgcctcagtgcatgcagtttaaatggcttctcgcaagatcagagcgacatgtactttcacacagggcgacaagttgctcgctagggacaatatcaaagcttgcacttctgctagatatcagcaaactcaaccctaatgacatatctgtaccgttacgattccaagaaacatactcaactccaatgtagccaacccaggcaggacatgatgttactgtggtattgactgcgtcgaagcaggcatcgctcagacccagattatcatatggcatttgatagccatcgagctgttggtaggtgactaacatgccaaaggagcccatacaagacacatgattataatcattgtcgtttcttcggtcacgcttgtgttgaccaggaagaaaagggaaagatgagatgagcaatccgtctacgagatagtgctttaacaaatccactcttcttccttatttcctatagcaccgagtccgggaggaaagaaaaaggaatgtcgcctgcgaatgctaaacttttcattttagccaaagctccaggcttaactaggaacttgactagtgggcacagcgggaccccaagaacctgcacctcttgtcgttccaaggtcatcaatagaatttgttccctcaaactagaaccctatcaggtcatgtgatagagacaaggattccttttcggtggctgaaactccaactccttttttacaattctcaacaatgttcaacctattcttaaccgggctcgtggcatttctacaacctgtttctagtcgtataatctctgcattacatcagcgctgtctaccatggagctctctagcgagcctcggccgaatcaccagaaagccgtaacatcagcagacacgcaccatggacagctataggcaaatcgatgcctcctccaaacaccccgggaaaaagcgagatctcccatggggattcgcgatctaccactgttcttaaaaggacgagagcgtctgtaatcgtctactccagtacataaaggaacaggtcaaagccgatcttgaaggcaaccagagaatggaccttctactacatcaccagctggtcatcaacaatgacatggcgaaagtcaatagtgctgcatcccatgagattcggaaccacttcaacgaatgggttgcagatcaactgcctcaggtcgtcgccagccctgaaatgctcgaatatctccaatctcagaaacttcctgatcatcgaggtccacagtacggcctcggtgcgcggtataattttgcctctttgtggacgatttctgcttggagtcaatcaagtatatcaatgattataggttcgatcctgttgtcaaggttctgtcagggttctggggcaatatgactccccaggagagggaataccaaattcatcctgattggcatgatggagaaacagatgatgaactcgaaatggctggctggatgcatattcccatacaaacttatgtgcggtcgtatgatggtctggaacagccgggggattgggatgaatattatgtacggccacccttgatgttgaacggatccagtgcattattacatctagacgaagagctcgctcaaattgaccgtgagttatatgtggtctctggttatggtataaatgctagattaaccgaaagacaaaccaggggattgaactcacaatttcaacgtagcatatcatttgtttataatgtagtggcatttgagcacgaattttggaatgattagttcaagaggatccatagagcaaggagaaggatcaagacaacatccgcctccttgtctagttagcaatgcggagaggcttggcggcatgcacaactccgcggaagcgcaccttcatcacgaagcatgcagtcaagcccgatgctgtaaaatatactcacctcgacaggcaaatccaagtgactcgcacctttgaatctagactgggttgcattgttgctaggttgcatctctagcgcgagaactaagcctttgccaaccccgttgggcaagtcgtacgaaccttggaatgatacagtgcgagtcagcgagccagccggtccgacttcaacccggaataacaaggcaagagattgcagggattgttctcttgccgtaggaggtaggaggtaggagacagaaacggggttgtatacctacaacctatgttgtaggcttcgctttgacagtggatcaggagacaagcaaagtcggtgagagtaggaagtattccgtatggcgtacgtcgaatacgaagatagtactccgtactagcatcacccaattgttagaccaagactagtggattggttctccatcggagctccgaaacctcgagatcatccaattcgcgtctgaaaggggacagccgtggccggccgtacgttgtgggttctcattatgtaatagcgcctggatccccgcatgatcggctccgagagaggcgagttcttgggttgtcgatgtacatgggaggtttagctgcatggatggtaatgcgttaggtaaaaagaactctggggtagaggaatcaggatgcatgggatttgatctgctgacgtgtggatatcagattattattgcggagcgaagcaattatatcatcctactatttaactacatgtcactattattgtattgtcttatatgttgtagttgtagttatcctgttctaaatgtactaatagaatgacggcacgtttccgcatgcgtcaaaaaaagcaactggagtctgcaggggtagctcgaactaacagaacttaatagcttagtgatataagaagtatagatgtagtaactatagaatttatatttatattgctctatttatatatagattaccttcagaatactaagaatactataagaatacaatacagatccgtaatcaatcagtttataaaagtcgccccatgtggccatgacccatggcgcatttcttagcatttcgtactcttcgaccttccacttcacctccattctgtacttcgcccaaagaaccccataaactcttaagccctcctcttccgatcggagaaaaccctgagattacctccaaattcgtgtaacgtcggttcatccgtttctgtgactaacagcttcgttttttttcttccccgccgcccctctgggccctaaacttgccctccggtctcaatacttctttgacttgaccggggcttttttcttttctttttccaatttggagtcctttctcgtttaaatttcggtataccttattatttttttcgttttgcctgctccaaggtactccgcgactagtcactgtacacttagagccctttatagagggcctcttcctctgcaccatgacctccgttactcctgctccttcgcagaccaagccggccttcccccgactctcttcaatcccctgtggtgatcacttccactctcgcgagtcgtctccctcgccctgcagtaccccggacggttccaggtcgagcagccaacgtcgtccctcattcggttctattaaagaagatacggaggacggtacgtaccgcagatgtgcgaatccaggctggaggctgacgtgatcatgggtaatcttaggaatcgcgcaatcgttcgtggacacgcgcgaagtaccatctccccaagacccggaccaagaccaagagcgtaaggtcgagcgccccacccaaatgcagcaggccccggatttttgctgtccgtgtggtggattcctggggtggaagcagattcgattgggtgggaagagtctgagccgcagctacagcgatctccgtggactcggaagcctccaagcaaagggctgggcatgggaagcccaggagccccagactatggagcttctcccaccgaaggtccccgaggtagagattttgcagacccctcctggtaaatcatcgttggagaggttcccgccggaggttcttggtaagaacccgcactgccgttcttgtttctcatgtgctaacgtcttgtagatcaaatcatctctaaccttgccgtcgatctccccccaaatggctacgccccccgcaacgtggatttggtctcgtgcctgctaacttcccatacgttgcacgctgcgaccttgggtgtcttgtacaggaacatgactttcccacactccatcattttctccaaggcactgaatcacatgtcgcagtatccggcgttgggaacattggtgcgccgtctggacttctcgcacttcacctccgtcggcctaggtcgtactaagcagatgaacgcagaaattcagaacctgacctccaagaccctattgcagtgcttggaactcctccctaatttgaaggaatgcctgctgcaggaacacctagagggcgacatcagtgtagaagtggtccggaagctctttatggggctgccgaacttgcgcgctttggatttctgcggttgctcgactcaggctttctctggggttttccaggaggctttggtcaatgggcctgcgctgtccataactttgccgaacctgaaacggctctcgcttcacgaatgcagcgctatccccgctcccatgttcgactacctcctcccgcgattggtcaacttgacgcacctcgaccttactcacacccaggtcaacgattcagctctcgttgccatcccggagactgcccgtatctctcatttgagcttgtcccgatgcacgcgcctgcgcgcctgcgccctggttaaattccttaccacccacccctcgatcaacgattctctcgtttatttgaacctgttgacggacccgacccgcttccgtctgctggaagagaccgatgtgtctgctctgctgccgaatctgcccgagactctccgctccctcaacctgggtggagccaagatcacttcggaccatgtaccacacttggtgcccctgaccaagcacctggaggagttgggtctcagctctgcggatctctcagttgcggacgtcaactcgttcttcagtccgtaccgcaaccctgccacgggaattgaggttgatactcccagcactctctgctatctcgatcttgccaaggtgccgcagatgactatcggagccatcttcaacaccagtacttgtttcctgctctccgacaaaagctatcccttgcaggtcgttgaattcagtgacaaaattatcaccccactgcgtgagcgtgcgaagacccatcgcgcatccgttggctggactgtgcgagacctcggccgtcgtggctggtacgttcgcgaaccctcctccatgccccacgaacccctcgacgatggcgcccgttactggaagatgggtgcacgctggtggggtatgcgcaagatccccatggccaccggcgaggtcggcggcctctacggccactacatgttcaagaaatgatctactatgagcgttctgttctcaaaagcgtcttcgctggatccttttatcacttgttgctgatacccttgatttgatatcctttattttcatttgtgttttattggaggcctcgcttttcttgctttattgcttttcaccttttgctttttgtttcacgatgaatgataatattcggtctatgcatggcggcgcgcaacatggtttacgaatttcggcattctggctcctggcttcgggttcgtgttctcggtcgcgttttgtcttttggttttgcatagcatctgagatctatctcttccggtgtctggtctttctatcttatatctctggcttcatatggcgttactgtatttatcgggattttactctgctcataaatacctatctagtctctacttcatctcttataagttcaatatagttgactcgatctgatagccctgtgtcttgcacttcattgggaaggagccaaccaccgtcccaaataggcaactacctgggacaacatccagggcacgcgttctccagaaaacgcgcccctccattttattctttctcacacagatattttgctttgttttctcaaccatcctgctgaactgcccctagtctaccactcttcagcatgcttctttcactccagtgctataggtaagttgtatttcccatgctcactaaggaacccgaatttaatccaaccaagaggacctcctccaataccacaaggaaccgaaagcccagccgggaaatgaagcatttcgggttgactccctcctctctgctgtccatttccaagtcctgaagagacacattctcgagtcttcgacccgggaccccccgtctatgcgcgggtcttcttacctgggtgtttgccttggtcctgccagagctagcgcatatgggcttcctgtgtctcccttttagtatgggacggagaacaagagcatcactttcatcgctgtgatgtaaccctctgggactttgcatcacgatgaagtcgctgaggagatgatcgacctcccgggtgagttgttttacatgcgtgatctagcatggctatcaaaactaatcggagaaaggagtggcttcttgctgagcagaggcttctgaagaaagagcacatgattgcattgtcggtgacggcgtttctgaatgtgccatcatattgctgaggaacttcgacgctcagctaaggatgttgctggcggatgctagatttgaggactacaacaacgaccacctagtcctcaagaaagaaattcgaaacgcaatcctgcaggaagccagacctatctttgagcagatcgtcaaggaggaacaggaaaacaggttggagagctttctcaaggaccgaaggatatttgccatttgacaacataccgtccatggcaatatttccctcaaaattgatcttcatggttggatgccttgcatgggctggtgccatagttgattgtgatgaactttttgtttgtgctctttccataggaatctttctctctacattcttctcctcactttgtaagtcattgatatctctatctactgttatttttcaaaaagggctttggcaatgtaatttgttctccgttagaattccagcttcattcacttagggcttggctcccaggtgacgcttggcaaacgtcaaatgtcaacgtcatgtgatgaatcgcagaagagccgcatttctcattattggtttcacctctacacgccctgtctctcacgaaggtctcagacccccttcgccaacttccgcccttggggaattgctcatcccgatgggtggattcgttaccgcctttgaagacagtggaagctgtccagacacgcgacgatgtcacctccgagcggagcggcctcttacaagaagaaagatgggaccctagctatatccgccgatgagaagtcggtttcatggagtcctgcggtcgcaggggccgggaatacgatcacaatccccgtggtcaacatcactagtatgcacccaccccaccatgcacaaggtttgtctctttgctgactcgcgcgactgctagatctacaacagaccccagcctcgaacccgaaagtgatgctcaagatcttttcccaagcctccgatgcgcctccgaatagtacgcccgatcaatatgtcttcctgttcacggctggagcaaacgcccgcccgcaggccgatgtcatcaaagacacattgagtgctcgagtcaatgcggtgaagtcgggcacgccatcccagacgccgggagcaagaggtgcgtctgagggactgtccgcggcgatggcgattgcgaatgctgtgacgtccgccgggacatcgaagaaccccgtggacgaggagaataggcttcggtccgacatagaactgcagcagtcgctattacgatctgattcgaatctgcagcggatgtttttcgaggggttgcatacgaaaccggaagcgttgtcgtctggatcgtttgtgtcgcagttttggtcaacacgactgcatttactgcgcgcgcacgcaatcgaacagggccaaatccgtggctcgtataatgtgttgtcttcacttaagccgcgagtcgaggataatgtcacgcggttaaatatcagcaaagagcagatccagctcatcttcacgcagcacgcactggtcaaacgcgtgtacgatgagaatgtgcctaagctcagcgaacaacagttctggtcgcggtttttccagagtcggctgttcaagaaattgcgcggagagcggattacggaggctgatgcaacggatgccgtgctggacaaatatctccggacggacgaggctgctcagccggaccgcgacacgaatatccatcactttttggatctggctggcaatgaagtaaatcacagcgagcgtagcggaaatcggcctgatctagatatgagaccgtctggcctcgacaaagtacctatcatccggacgctgaacagcttgagtgaaaagatcatggccaacgtggctccgattgacggtgatatgagtgccccgataggcatcaacgaagaggcatggaaaagactccagctgcaggatctttgtagcgaagaacatcaaagtcccatcactctgaacattcgtgatcaaagtcgtttcttcactcatggccaagaggaggataagaccaagcaattcgtgaaacaagatccggagcagcttctgcagattctccgtacggagatcaatcaaaatctcccatcgcagggcaatacacaactaggcaagctggtggacccaggcgatgacgaagacgaggagatggaggatgcacctgccagccgtcgccctgtcggctcatctgctgctctccacgatgcattttcccagatcctggaagcgttgcgtgagcgtcgtgctcagatgaaggagcgagcgacatcagaaacatacgggctgtcgatagcgctctttgaccgcttgacgttgacacacgctacaaccacagagttcctgcaccagttctggcaggcgtttctctcaggcaaccccgaccgcgctggagaggtcgcgtctttagcagagtctctccatcgagcaatggagcgtattaaggctgttgctaatgacgcagaggctgagcggaaggtcgaagttgaccggctgaagaagcaggcccgtgacatgtacgagagcacggggcgaaaattgcgagtcaacttagaaggcgtggaggggggccagaaggttgtgaaccagcttcttggtcctacgctccatgcactggaggttgcatcgactcgatatcaaaaagaattggccgaacaaaataaagaagcggccatggctgctcaagacacggcggggacatagaagggaacaagccaggcgtttgagattggcgcatgggatgtataatatgataggttataagaagttcaatgattcattcatacagagaaacaaatctcgatatctcattaatctacatagccaagtttgtctacataaatgacataaaaatgatcacagatcggcatgccgagcttccccggacttcgggaccttcatgccatctgtcccctcaactaactactacactaaaccttctccaactccccctctccccaaaatcggatgattctcacaccagatccacactgaagaaaaaaaaggggcctcaagatgctcacctccggcctcacaaatgcgcccctcaccaaagcgctcctcatctacacgatcgcctcgtccatcgctctctccctcttcgacataaaacacctcgtcgtgatctatgtctcgccccatttctggccctactcccagttctggcgcgcattggtgtggcaggtcgttggctttaccaattccagtgaggccctcttcgccgccatgctagtttaccatttgcgggttgttgagcgcgcgtgggggaaacggaagatagcggttagtctttcttttattgtctccgtccccgcagctatgcgaaccatatgctacgggaaacagagaagccaagccgaatggcttcatatacatacgacctatgctaacaacgataactgctcgctagaccttcctgctcaccacactcccctacacaactctcctcccaccaattctcctcgccctgctactccgccctctctccctaaacaatttcaattacctgccctccggcccaacagccacgatcttcgcgctgttggcgcagtaccacgccaccatcccatacacataccactaccgcatcggctccacatccacatcctcccccaccacaacaaacaccaccgacaccaccaccagcaacgatccctctaccgaaaataccacatccccatccgaccctaaacccccaccaccaagcctctccctcctcctctccgacaaatcaaccacctacctcgtcgccgcccagctagccctctcccagttccccgcaatgctcctcccctcggccgtgggctggatcgtcggcgtcgcctggcgcgcggacctgctaccgggtctgtcgccggccagcaccggattccgcgttccggcttgggtcgttggcgagcaggagcggaggggtggggctggggctgcgtctggggcggagagggagaggtatgaggatttgcgacggagattggagggggaggttgcggcttcggcttctgggctggaggggtctggggcacaggctcagagacgggcgaatactgctggtgagggtggtgggtttgttagtcggttgacgcgtgattggtagtttcgcttgtttttttctaagtgagcttgcatgcaaggcttgtcgggcattttctatctggtatagatgtatgattgagatagttattgggtcttttgtaggaggtgctagcccgtcctcaaagccctatattcgtatatcatcattgattcatagtgtcccccaagttcaaaatctcaccaattcataaatatacaatacgataatacttgatcaaagaaagaaatgcataaagtctagaatctcaactagcaaggccgtatctccgctagagtatgtgccaattgaaaacaccacataacgccatacatcatgtctataaccctgaacggaatattaccgtccattgcgactccgtctcatattttccttgcactcgttacaataccattttactaatagagacgagactgttagcaacctgtatgattccaaggcaaagaaaaacctcttaccattcttcccaggcggtttcgtcaagcccacacacgacaaatggaaccattcacgcggacacgcgtcattgtcgcaagcaaccatctcgccgaaactgatttcgttacagtaacagtagcgcggctcgccctcttcgtcttcatcgtcgccctcgtggagcgactcgtcgtcggagggtattgcaggctgtgggatgggctttttctgggttcgtttggtagacgctgggtctcgacttcgcgtgggtcgtgcgtgttgttggctgggctctgtaaatgcggtgaggacaggcgttgatgtcttggaattgcgtcccttggtcgtctcgacctcggcagaaccggattttccatccagatcatcgcgcttggttcctgctggaacggatgttctaccgttggcatcaccgtcgtagtcacggtgtgggtctgggtggacaagttcatttttaacgggtccgtcccggggtgtagatctggaatcggcaactttgtctgcgtggaggacatggttaattgatagttccgggggaagtggttgaaacggcatactgttgttaggaaggtttgaagccgatgacgatggccgcgcacgcgaattgcctggtccagaattctgggctcgtgaagactgtggccttgttgtgttgggtcctggactagcggcagcccgtggaccattgaatgttccaatcaaaggcgatggggccagaacaggagatgcagcactagaagcgttggccctaaaaaaaagtcagttggatgcagcagtgaacacagcgaaatgagacgtacttcttccgggcagcagcggccgaattaggagcgcgagtccgcttcttctctactggttctttattcgcggctctctggctcccagcaccgctagcagagcgctccatcggagcactagtgtcaactggcagtgagcgctccaccttccgacgtttgggtgcagcggtggcgtcagccgcgtgatctccaccccgagatttcgcattgttgttcttgcgggtgcccgagctgcgcgtatcctcatagtctgcgtcggcctgtgcccgacgttgtttccgagccagaacagcatcgcgccgcgcctcactgcgactagcagcttcagcctcttggagcacgtgcgacagatcctgtctttgcgctaccgcttcccggcgcggacgttcattagtcgctgccttcgcggtactcttgttggagtacgcccagtgtgtcaagctgcccaagcgagcctcctcgctgatctcgcctgcaatgtatgggaacaccgtatccagtcggacaacctggcgatccaattcctcgttcgcgttcgaaatgacgtgattcttctcatcggcggtcatcatcaggtcggagaggctttggcgtacacgatcgaagagaagccgacggcttttgctctcggatgtttccggtgattgggatagttcctggcgcaagagtggcggtattagtagacgccgagtagacaattagacgaatcgcgcgggaagctcaccttgggcaaaacatcctcccgaatcacacccccaacgataggcgccgggtgtgggggatgaggaacgggctgcgactgggaggagaacttgagtaattgcagtagattttcctcgagagcccacgccttcgcatcaacttccttgagaagagagttgtggcgacggaactcgcgcggaagcgctgttatcgcatcggtgaaatgcgtgagcgcaggatagaagccgtggggaacagggggcgtggaaggaatttcagctgtcgagcttccgccgaacgcgaaggatgaccgtccggtggttttggagattcgagacgggtttgtacgtgtctgacgggcggactgtcggattccttggcccggcgtattgttgactgacgacgagacgacggacgtcgtgaagggcatagttgttgagactggagctgcgccgttggaggagagttgaggtgagcctaccccaatttgaggaggaaattgtgagatctgaagaatcaatggtgttcagcaatgacctgggaccatggacaagagtcaacacctcgcgtagcaacaaaagggcatcgatgcagaagaaactactgctgaagtttgcgtgcggagaagagcgattggcaatcgaatcaggtgatataggtgcctgcagcattaatcaggcatcagttgctgaatcatccgagcatgtgggtgacgtcatatcaggaacatcgcatacaatcaatgcaattaatgcaatgcatgtgagctacggtgatttgttagaagtttactctgtagaacattacaaattacaattaatgcaatcgatgacattataagtggaaaataaatatgcgtctagtcaaggattctttgtattttacatatagcgtgaatctaggtatagaaggagaccttgtattaggacaaccaaaagactgtcctagcatagcatgactatgaacctaggacacatctaacacacaaaggaaatcagaacaataaaaagaggtagtacaacaacgaattacacggtaggttctaggaaaaccgatgaatatatgacacccaactcaatgcaagtgtcggtgcaagatgccaaatatctcatccacagaagtcggatcaaatcgctaaaaaggcatttactcgttcttcaggtgatcctgttcaatagagaaagcatcctcaaggaactcctgctcctccttgaggtggacggccttgagaccggtggcaacggaagcgctaggagcgcgaccggcgtacaggacatggcggcggtggtggtgctcggtagagttgagcagggtttcaagacggggctgggtgtatgaccaggaaccggcgttgagaggctcctcctggcaccagacgatgttcttagcgttggggtagctgtccaagttctccttcagctgagcccaagggaaggggtgcagctgctcaacacgggtgatggcagtgttggtgatcttgttggcctcgcggtgcttgatcaaggcagcgtagacctgtccagagcacaggataacacgctcgatcttctcgggggcgtcgatggcggcggcgtcatcggggatgatccactggaagtgggactcgccttccagggcctcgatgtcagagcgggcaagggggtgacgcagcagagacttggagaagaagatgaccagaggcttgcggaactggcggtggatttggcgacggaggatgtggaacaggttggcagggctggtcatgcaggcgatctgcatattgcagtcctggtgctgacggtccagcttgtcggccgaggggaacacacggggctcctcgttgcaaagctggagccagcgctccatacgtccggaagagtgctcggggccctggccgtcataaccgtgaggcagagacacaaccaggccggaacgctgcagccacttggattcaccagaggcgatgaactgatcaatgatacactgagcgttgttggcgaaatcaccgaactgagcctcccacatcacaagggcgttgggggaggtcaaagagtaaccgtactcgaagccgagactagattgcatgttagaattattattacgcgggggaagtcgacttcaaaaacctaccaaccgtattcgctcagggaggagttagagatgacgaagcttccctggttctcactgacgtggtgaaggggggtgtaagtgctctcagtctcctggtcgtgcaggactgcgtggcgctgggagaaagtaccacgctcaacatcctgaccggagacacggacgtggtagccttcctcaacgagggaaccgaaagcgagagcctcagcagtggcccaatcgatgttcttgccctggtcaacggccttcttgcgtccacccaaaatacgcttgagattgtggtggagcacgaagcccttgggaacaccgtcaccagagatcaggtcaccaatgtgctgtaggttcttggcaggaacagcggtaggcaggtgaggcaggacctcattggccagctccttgggagacttgaagttgttccaagcggaggtcagccactccttaccagtgggctggtagtcatcgctgcgatcgaagctgtcggcgagcattccccagacccacttcttgtgttcatcaatgtcctccttggtgaaggtaccctcggcaatcagcttatcgacgtacttgtcgagctgaggcttctgggcggcaatgcgcttgtacataaggggctgggtgaacgaaggctgatcagtctcgttgtgaccctgcttacggtagcagaccatgtcaatgacaacatcactcttgaactcagcgcgccagtcggcagcgacctggcagatgtagttgacagcctcaacatcgtctgcgttcacgtggaagacaggggcgtcgatggacttggcaatatcggaacagtagggggtggaccgggagtaacggggatcggtggtgaaaccaatctgattgttcacgataaggtggatggtaccaccggtggagtaggcagggagagagtgcattcccatggtctcgtagacaacaccttggccagcaaaggcagcgtcaccgtgcagcagaacacccatggcggtgtcgaagtgagactcgtccttgttgtagtgctggatagcacgggtctttccaagaacaacagggtcctcagcctcgaggtgagaggggttggcaaccagagacagctgcactcgcttaccggagggagtagggcgctcaaagttcatacccaagtggtacttgacatcaccggagccctcatcagaaggctcagtagagccggagaactcgctgaagatggactcgttgggcttgcggacgacgttggacaaaacgttaagacgaccacggtgaggcataccaatgacgatgtccttgataccgtaatcgacgctgcgatcgatcaaggccttcataccgggaaccagggtctcgcaaccctccagaccgaaacgcttgtcgttggggaacttggtagcgaggaatgtctcgaagctggaagaccagatcagacggtcaaggatgcgacgcttgtcgtcaaccgagtagctgtaaggctgggggacctcgaaacgatcacggatccactcgcagggcttgcggtcgggaatgtgaatgtactcgacaccgtaagagccacagtagatcttctcgcaggtggcgatgatctcgcgcagagtcatggtcttgcgggtttcggtgatgaaacggggcaagataccgggtccaagggaaaactcctggtccaaatcacgctcagtgaagccgtagtggtccaactcaagctccttgggcttgtcgtagccaaaggcctcggcctctccgcgaatgccgagagggtcgatcttggccttgtggtgaccacgcgcctggtaggcgcggcagagcaactggaccttcaagtggttggtgacgtcagcgccagcgtggaggcccaggccgggcatttcctggggaacaccaccggtaggggtggggacaagggtagggggaggagtgaaggcctgggagataggcattttgccctcttccatgttcttgaagtacgcctgccatgagatgtgaacactcgaggggtcgttcttccatgccaagtacatctcatcgatgtaattggcagtgctgccagtaaggaaagaatcgttggggtcctgttcacgtaagagcgatcgcgccgtcgcattagtcgaatgcccgttgatatatttgaactaccggggaaaccggatcggattgacaccgatcatgaggattgttgttgcttaccactccttgactaggtccctccgaggaggccgcataggaccgggaaccgttgaaagcacggtcgacaacagccataggccgacgggcggccaggctgaagccggagctttttgacgtattgcgagcagctgtggcgaggtggaatgaacgccggcatgatgaagaggtcgcaccacgcagcatgccgctgttggtggccttcaaggcactgtttctgaacattgcgggattttcttggatcaaggtccaataaagtatttcgaatttagaggagaggagaggggaattgggaagacactagttcgtgtttctgaccaaagagacgtttcagagtcaggttcactgtatgctatcgtgttagcctcgaattgccaggttgtcctgtagtgcgagcaagccggaatacggaggaaaggaagggacgtaagtatacgtacgaattaaatcacaaatcaggtgtcgactagtattgccgtagcacctgtatagacgcgggactcatcagagagctacaacgctctagataagaaaataaagttaggggaagtggtagaagaaagatgaagcgagagaagagcgcaaaaggatgagctgccgagaatgacgggtgtgacggcagctgaagctggtgtgctgagtcagcccgagttacagccgatgcaggagccacctatctagccctttcgaccctttcgaccactttcatacgcagaacctcgggagagccccgaagatgcccactgctttccgtagccggctaaagcttttgggctgttgtccgggaattttcggcccaatggcactggaagtgattgcgattacatacatctccctggcttcccggatttccctgcttttccagcgccaagtctttttctggctgtgagatctggttgggatcggaattcaagctttgtttctatcagattgcgatcgctattaaaattaacgtatgaaccgacagtcgataattcatgaaatcgtcacaccgcacaatggccatatgcagagaaataatagatcgttagagccagatttacggatgtcaggcaccatattacaagacattgagtcgctgaggtccactgttgggaatttcttcagaatctggccgcccggacaacggcgaagtagtacgtggatgactgtcgtcatggaaataaccgacaccattggaaactccctcatcggggctgaaaggcctcgtttcagagaccgttgggcttgcttcggcaccgttgaggctggcgcggtgagagggcgacagcgggtgcggtgggggactacctgcactgctgcgtaggctaccgttgctcccgccccaagccccacggcgtagcttcatgagcgcgcccagggtcatctcatcgtcgagactgcccatgtcaaccagctgcgccagcccggggctcgctagagctgaatttggatgcgtactgccgtgggccttgatggaaatcatagagttccgtgtgctccattcgctccgttcagtgataggggtcaaactgggttcttggaatttcccgcggctgctgtggttccgtgtgatgccttcgacccgtcgcggaccgaagtatccaccgttggttagctcagaggcgccggtgccatctgcgtgtgcgtagaagccgaactcttgaccgtagaagccatcgtcgtcgttctcaagagcttcggcgttagcagcagcaacgatggcatcgtcaaaatacgaatcatcgtcatcgtcgtagaactgatcatcgtagacctgatcatagacgttgtcaaaggccatggcatccgcaggttgcccgacccggctgtcatcagaaatcagacccggttgcgagtctattgtcggcgatatttgacctgtgctgtcttgtccctcggatccttcgctcgtgccgaactggcgctcgatccggctactatatgatgcttcattggctgcgaaagctagagcattgtgcaaaatatctagattttgctctgtgagcacacctccaccatgggcacgaacagggcccatatttggtatcggctcgccgagaggaccacgcttgattgatcctgtgacccggtagtcactagccacactaggcatgtgccgcagtgcttggtctcccatttctgccatggggctttctttccccgaagagtcgtccccatcagggccgtcggggccgtcaggggcgtcaggggccgcactgtccgttggtatgggtgctgcagggggagcgaccggttttctttcgtataaatgactggttacgtcatcgaatatagattcgtcaaatccactatcttggttatcggcagcaagatctccgaaatcgccgtcatcaaaataaagatcatcatcgtcgtcgagaattggagccgcttgctttgcaaccggaacctcgggaaggcttgatgtcgcatcagttctagcagctagggacggctgttcctctggtagatgttgctgggggccatgatctagttgtgtggcctcggatagacgagaggctgagtaagatgggttttggtttgggtatggcagtgcagcagtgagcgggctagcaacagtaagcgggctagcaacaatgggtgacaaccccgggacaacccaggacttggccttgttgatatctcgcggaattgagaaatcatcgaaatcgtcatcggcatctgcattgacgccagggatcctttcttccagaccatccaggtcatccagcatgtcatcatcgaagtcctcgtcgaagtcatcgaaatacccatcctctattttgcgggaggcttcctttgccttgtgcttctcttctagcattctctcttgtgtagatgattccactccgatcatatcgaagctgaatcgggacgcattgctcttgagatgtctcggcaaggccgaggggttgaagggtacattaggaatagtatcttggtcttgagggtgctgaggatgagcatgcgagattgttgtgggtgatattggaggttcctcggcctcatgctcacgctggtccgaaccatctatagttctgtctggtagatgtgaaggcaagttccgcgcaaagaccggcaatgagctatcataatcaggctgcgattggcctgttaaaagtgaagactgaagataccccttattttccacctgtagaacattctggtcctcgaaatgttccttgaagacaggcgaatgatcactgtgccgtttcgcctggtcattccaactggcgccacgtggttgactaggtatttgcggtggtgaagtatccggcccattcagtgtatcctgctggggagccgaaaggttgcggcgaggccgaggcgccgagaagtcatggacaatctttccacgaattctaggatcatagtcatccggcatcggcggaacattccggtttttaattttgagatcttcagcgcgggagctaacgacctgcgaggagcgcctgcgcgcaagaagagacatcggattcaggagatggagcatcgccttgccagacttatgatgtgtctgttctacagacacatcccgatccccagtgcgccggacggtcgtgctaccctccatcttgaaatccctctgtgtcattgtttgtttatccgccggcgaagcgtccggcgaggttctgaaccgaaaatggcccgacgccgttggcgcagtcggcgatcgtttctgcttgccgaatgaacgtcggaagggcgagcttgatttggaattcggctctgcgtctccttgatcggaccgtagacccgtcacagacagttgtgaattattcgactgggctgtaaattgttcttcctcggcgttatcaggactggaatgaggacgacactctttttcaaatgccggcgatggaagagcaagagtaatggaggaggatatcggcgcgacggatgagctgatgttcagcttggaggtatctatgtccagcggcgcctcgttcgaagaggggccatcgggtgaggggtgaccgtcgagggcagtggtgagcgtcggtgtatccggaatctgtggaagttggggagggcttttaatggggcttccattcgctcccttgacaggtgagggcgcggggatcgaagcaggcgacgcggacgaacgtcgatggtctcggcgccagtacgaaaagacagtagatggcggcatggcagttccttgaggccctcacgacgccaggttgagtcgcgcgtatgctcaagcggcgtaatagtccattacagttatcaactgcatatgctaggtgaacaaatacgctgtcatatacagacaactggaccgtggggagatgcaaaacccacccgtgggattccaaggttcgtaaccctcaagcttttgtaagcctattaaactcgattgcacgcaaagaaggggtaatccatagcaaattgcagtaaacatctcgatttttacgtttatttatacaaaagacaaagatcaaagtaacgcgcggctaaaagtgaggttacacccatcctgctgcagtgtctgggcctttctacaatatcgcgtcacattcttgcccctactgtcgtcttcaatgttgactttttgctgagctgggcgcatatggttaaattccccgaaatgtatgcagttattcccctgtaaatcgtacagctaggctccgtagatatccttcgagaaaaataaataaataaaagaatgacacgctcaaacagccatatgctatgctaacggacaaaacataaagcaaaaattaagtgataacgctttcaacgaatgctttgcctccagcgatcgatcacctcagtcttgaccgggccagggggtaccatgtttggagcataccccacgccattcatgcccatcgtcgcagggttaataggatacccatattgttgtgccatcgggtatcctacaggtggcggatatcgcatttgtgtcggaaactgttgcatggacatgcgattcccaaactgggacatggtgacaggccgctgattgaaaacatcatacgacgactgacgagaaaggtgggagggacgaccctgtgtaagcgcagccatgctccggcgcattcgcgggttctttggagccgctggagcagcagcggcctcttttctaaggcgactgcgtcgttgtgcgagtgtctcttcctcgatgggaacggggacttcttcgggctctttaggcgcaactccagcccgggtgtcaatttcggccatcaagtcgctggcgaacttactctccgagcgtttatgtcccttcaaccgttgaactcgctcggcgagggtctctacctctgtttcatcctcgctctcggcggccggctcagggacatgcgccgggggctctgcatacattgtaacaggacgttgctccggccgcgggattggttcaccccgcaacctggcacggcgtgaactcagaggctcattttcttcttggtgccgcatcgctagcagccccaaaggtcgatcttcttcgatgttggttttctcggggtacagcatagccaggggaacatcatcgtcatcatcccgtccttcccaggccaaagcgacaggacgttgccgccggttatcactttgcttttgaaccatatcgtccatttctaataaagtggaccgcataccacggaaaggcaccggcacaattgtccgccgtcgatgcttcaactcatgtttccgcaattccaattcggcgatgagcgtattcggtggaccaacataatccataatatccgcgtcgtcagacccctcgtcttcagattcctcactttcgccatcagtgccttccggcccacgctcatggccgtgctcatcatcatttctatctgagtcgtccgagccatgtcgcaaagtggcggggacctcatcttcttctacattattagtgttataagactggccaaagatggcccgcgaaagacggtttgtcttgtgcactgtcgggtcttttgtcagggtcttgcgttttgacgtgttgtagatgaacgcgccgacttgaccagcatatgggtgatcggtgaaagccgaaacgggtgcattcgcagaggcgtccaaaatactctccagcgtagcaaccgcggactgttgtttgacctcgacctggagtgatgtactcggctgatcaaaaaatacactggcacggagatgtggtggcactgtcgatttacgtttatcgttatggctatcgcgtgagtctcctaggacggcgtcgggtagcccaacagttgactttctatcctgagcggcgatggcgcctgcgatttgtgtacgacgcttatcccggtcgatattttccctgcgtgacaacttcggtgggagattcaacatgcgtgggacaggcgcgggataaaacaccatattctcccctgctcgcgggttcttgtaatggtccgggttgcgggcgagcggcggctgctccagagaaacctggcgacctggttccaagggtgtgaaatggacgccatcaaagtcggtgaacagtgtccgcgcctgctggtaggtatcgaatgatgcgaccgaggcccggcgctgcaactccggctctgcgggaactccttgtgggacatattggtcgtaatagtaatcgctctgggtattgaagaggggctgtgccggtgggagatcagggagcccagggaattcatccacttcaggctcctcttcatgtgcaggctccgcaagctgagctagacgcgcccccgatacggagcgctgacgcccgggcgacgcaattgatccatgggcggaggaaattgtggctaccggggagaatgcaccagtccggtggattgaattggacgcggaactgactgagcggcgcttttgctcttgatccatgcgacggatctcgctctcaatgtccgcggaggacgagctcagctgctccgcgctttgctccaaccgcgtgacatttcctttgtaggctccttgtatcgactgcaaatccggggtagggtggctgagaggtacgggaacctcactgcatgcgctgtgaatggggcgctccggagaaggatttcgcgcggtcgtattgagtggtgggatacggaggctgttggctcgctcctcgggggaaggatcggcgtcatagtcatcatcttctactacatcgtagctggcagcagtcatggagcggatcatcgaacctaatcgactgaaagtcgggttctctgtagttttggcagtttctagatggcttccgcccccgatatgatcagtatcgagcggcagctgctcaaaggcatgtttgtgagtgggcgagggacagggcgaagcggaagcggaagagacagaagccacctcgtggtcgagctgagcgatggcgttgtacgccataatataggtcttagtcaccgactacccatccattcagatcgattcaaattaaagaagatttcaggatcaaaggaactcggaataccagggataccagacaaagaaacgaagccagaagagatgtagggaaagaaacgaaaaaccaggaaattgggctgggggatagcggctaattttggaagtttgctgtcgtacaataatttgccctggaatgccaactgagctagtaactccatgctaataatatatcgatgcaatttcctcctaaaagtcccccaaaagcaaggaatccaaagccactaaggggcctctgcgtccgtgtcttagaccagtcaacacgttctgcgcgccgagtcaggcggattcgactctccactctgctctagaggtcttggcgtttccctatatctatataaggagtccggaatactcggtataagaagtataaggagtgtctcaggcaaccccttaaccccccgccattcctctacttcgctgcctttctacaggcttcccgggaacatgcatcaaaaggaaacccaaagaggcaatcccgaggtgtatctgcatctgagctagaggacttgacaaccccggaccaatcagaccatcaacagatatcgcggcctcaacttttttccatgagttaaattgcgagttaaattgctttcgaggtttaccttgctaggtctgaccagtgagaatacatcgattagggttggagactcgggtcgcgtgacctgtcaagttcaatggctccaatccaactggcaccggtcacgtgctgatagcattatcttatcgcatacctacctcatacatcgtctatcctgtcctctttcctatcaccttgtcaatcacttatgagatctgcatcttttccaatcaactactcatcatgccaagcagggacaggagcagatggcgcaatgtccatttctacaacgcgtccaacgacctcctaggaggtttctaccaagctggttccataaccgacgctaacctgatctggattctccggagcgtgttgctagttcaggcggagaatctcacgataaagcatcgggcctccgatcgaattatcacaccatcaaataactccgttgtccctggcgactatgtcatttcctgtgatggtaagacttcacgtatcactagcatacggttataattaccaccgttcgactaggaactatcagggtaacggacgaaccgtggtttgctcgcgtgatcagcttttctgaatcgggtcgagaagattcatttcgtactgaggtccgccagcgagacgggagatgtgttatttccggcgatatcaaccttcttgagccttgggatatatgggatggtctacaagctgcccatgtattccccctggaaaaggagaatctatggactcagtataacttcgggcgttggatcacgaatatggaccatacgacaggagtttcgaagattaactctgttcaaaacggtttacttatgggtgcgacactacacggttgtttttatcagtatatgttctctatcaaccctgatgtacgtttcctaatgaccaaatccctacgcagaataagagacaggacagatataagattgtcacatttgcaccagattcctacagaatcaatggaaaagtccttgacccgatctgccggaatccaaacgacctaaaccatgtcgcggacgagctcctaagatggcactttcggcaaagcgtgctcgctaatatgaggggggccggggagccgatattcgagtcggacttcccccctgggacagatcaaatagcgacgttacgagacgaaccatacggcaaggagaggttgggaatggagtttgaactcagactcggacctagagccaaagaagaagaagagtcgacatattaatagggacatcaacaactactagactcgaccgtgatgtagcttggttaagcgcaatgaggaggtttttgtatcactaccctgaaatagtgctaattcagcatattattagtgctttcttcaagtcccactaggtgagggttcgacgataatgttgtaacttgtggtctactactcctagtgaacgactttgctttcgccctgtttgtaggcaggccgtgtcggtacccctgctgcatccgttgcagcataaattactctttcttcttttttgcaaagatcaagaagttctcgcttccctgttcttctggtgggggcagtagaatgtggagaattgaaatatggtacgagctcttgatacccaaaggatagaatatacatattctaggacagcgtgttcatcccggctgtctgccaagcaatctcgtgttttcatcctcaattcgccgtttgtttcgccgatcgcccatgtggctcgtatacatgtggctcgtatagctcgaggccaaggtgaagaaacgggactatttttggtaacatatctggatctttcagacctcacgtcgtattcgccccggacttttcatacagaccatcgttttagccccagagtacggttgatattcagcatcttcatcgtattacgagaaaatgaaacgaagaaggcctaattttaacaaattctccgcggcgctcagttccacgttgatcagcacctggtaaagatccacgcatcagtcaaggtataagtatcctagcccggcctgatgcacaatattctggttacaaattcaaagacattcaaagtttcatcgtctctcgtatcaattcaaagctctatcctcgaacgcatcattgaaaggaaacgaagtcctcagaaaaacacgcaggatttgcctactttcctaactcgccattatgcgattcacaaacttggctctgaccctagctgcggctttctctgttgccaatgcgtacgccatcactgccagtgttgccaactgccgtactggtccctcgacgagcaatgcagttgtcacgacatacaaaaaaggtgccgatgtcaagatcacatgccagacttatggcgaaaacattcagggaaactctatctgggacaagacatctgacggctgctacgttgccgactactatgtgaagaccggctcaaacagcatggtcaccaaggactgtaacggtggcagctctggcaccggcagctcttcctacaagggcaagatcagtcgcaaggagatcatttcccgcggtcagttctgggtctcccgccacatcccatactccatgaacgccgaatacccggacccccaaggccgcaaataccgcacagactgctcgggcttcgtcagcatggctttccatgcgtatgcgccaggatataacaccgtgagcctcccggatattgccaagtccatctcgtggagcgacctccggcctggtgactttgttggaaccctaggcgctggtactggcggtgctgctggccatgtcactctgttcacttcgtgggccgacagttccaagaaggagtacaatacgcttgagtgccgcggtacgtacggctgcgttgcgtacaggcgccctgttggttggaaggttggaagtttcacggccaagccctacaggtacatccacgttgtggactaagctggagcttgtagcattttggggttgaacggtgatgtaaccaattttggtgcgtgtataagtgcttgcgacggctgcggtggttgggtaagcggagggatatgaatagcttcagatgaatttgtgagcagatcagctaggcagaaaacgaagaaaagatgaagttgatatactcctgtctgttactatcttaaaggatcggttggtagtacttgctgttcttgcctaggaaggagaactttccttcctaccgcgtaggcgagcgtaagcgagtaaatcctatttgcatggtttgatcgaagacgcacaaatgggtttccatttttcctctcttcgtcctttttattctcactttttgttccgatataacctggccaataacactgtatggcaggacaatgctaccgtagaatctggacaggtccagacaaaaagttgttaggaacgtactcttcaaagcaatgatgatgattctttaatcaaatctatgtgtcctcggctacgaagatttacacccctcatgtattccgtgggacttgtcaaatggcaatgagagccacgacttcaggaacgtccacgggaacgcccggtttgatatctgatgcagacctacttggacctcataacaatggtaatgttatgatccctgtggtaggtgaagcagcatgtgctacgggtccctctgcctacactgtctcgtgggctacggtgagatggtggtcagagagatggggaggagagaagaagaagagaagaaaaatggggggaagggtccttttatacccccaacccacgtgccttcctaacgtgtgccaggtccctcgtacattccctgtcaatgtcaatgtcacatgcattgtgccttatttatttgccttctttgtttacacgcggtccttcgcgaggcattaccgtttcccaacttgaatttctacttccagtgctctgattgtcgtacttgatctttatttcatccacataacttgacccgtagctttcatagcttgaatgaaccagaaatcttccaatcatctcccaaatcggttcctgtcttctatggaggtacaacgcccggataaagatatatgtctatggctcgattatagtaatggtctatcagctctttctggggtacttcttcacgtgctatccttgagcatataggagaagacaatccttttcataagcgcttcatctccattgctagcagttttacttcggatactccaagacaacctttcgagtcttgatgtggatcaagacctcagggatctagtatgcaaaatgacaaacctagatctcaagaaaaggatcaccgcaatgcaggcacttcagcaccgctggttcaggtcgatttaagaaaactcgcagtataacctgggataagattgtgttcaattcttcaacattcggaactatatatggcaaatttcctaattctggtgtgctagtgacacgaaagtactccgtaccaaaaacaacaactgttgaaacacgctaatcgggttgcagcaatacaatttgtttcaaatcgtcacaatgttgtccatcctgatgctaacgacgcctggtctgtagtatctgcaggggactctgcactaaggcaaacatgggcagaggtagaggtgccatcagtttagcacccggcggaagtgccaagggtcgtcgggaaatattatgccggtttcgctggaaattgactgcaattacgctttattctttaagatagcttaacattcacattctcatccggggcactgaggcatacttcgagcaagcattccacgacagggcgcatatcctctttgctccttggcgagataaagagccaggggtatcgatcatgagatgtccgctatatctgtgatctgaatttagcagctgctgcagctgctttctctaatggcgatgtttacggcataaagggaaaatctaaaggtggtatttcgcgcagtctgaggctcttctaagaaaccgccgagtcctgtggaatattcgggttgaaggcacggtttgaacaacgtagtcaatttatgagaagtgagggggattgaagcgaaagtcgggcagtcatacatgattgtatcacatgactaaaacgggtgcacgctcactgccacaccgagacttcatcgaatagagactcattttagactcatttatagttaggcatggaaagtgagtgctacggtggcgggctaagacaacacggctacagtgccaacaatgattttcactcaacgataaatcgcacaagtcaggtacattttatggtatactaataccattggccagatcattcatttataggctgcagcctcaaaagatatataaaagacttgtactctagtcgtatacaggaaatagcaaaattagaggtggcggtgacacactagcagttaaagaccgcagagccttaactcttgaccaacggtactccaggatggggccggcctaacatccgccaattaggcggcgtctacataaaaacccaatatctgtttccttggaatctatccatttccccggtaaagttatcatagggggtttggtggatcgacggtgacgaaagagtggagcttggggggttggaatcaagctttgacatcttgaagggtttaaaaaccattgggacatcttggactgatagaattgtacattcttttctccatattccctcagcaaggtgcttttttttattgttattgttgtgatgggaaactcgagggaacctggccgggatggcggagtcaagggtatgatacaggtttgaagggattgctgcgagatagcaataatgctgatacaacgacagatgctgtggatgctcccgaatatgagcaaccagaaggcaccgaagaagaagcaagcaagaatgaaggcatgggcaaaaacccatcatatagtttggctggctctggcgcacagaatccaaacaacaaccaaggatatacagatgaagagtaccagaagtacgcttctcaatataacaaacaagatgatggcccgacctggagcttggctcatccactgccccatatagtccggcccggcatgcgtcacggcgccttgccagaggaccgaaaagaggatcgaaaagaggatagagacggcacgacagagaaccagcaggattcagcgcacgaggaggaagttcgcaaacagcagtcgtcagaaaatcgaacgaagaaggtcaacgaccccaaagaagacggctttttcaatacatggtcgaaaattcgccaccaacttcgtgagccgctggccgaatggctcggagtaagttttatcgatatggctcaaaaatacaatcaatcaagcagtctgctaacaagtgtctcgcacagacaactatggcaatgacaattggtctttgcgcgaccttatcaaacttcacttcctccggacaagccggatcataccctgcccaaagtctcgcctggggctttggattcatggtcgctatctacaccaccggaggtatgtctggtggtcatttaaacccagccatctcaatctcgctgtctgtattccgtggattccccgcgcggcgatgcgtgatctacattgccgcgcaactcctcggagctatcaccgcagggggaatatcatacgcgatctaccatgacgccattgttgaagtcgccagattggcgaacgtgcctcagaatgcaagtgtcgcctcgcaggctctcctcacgttaccgaaaccatttgtccgtcctgcgactgcattcttcaccgagtttgtcggcagcgcaatattacttggctcgattctagctctgggggatgacactaatgcgcccccgggagcaggaatgcaggcatttattattgggatcattatctcgattgtgatccttgcacttgggtataataccggagggtatgtgtcctatttctaaactcccgattctaagtgctttcgaagataactaatgatctgatagttgtttcaatggcgcacgagactttggcccacggcttgttgccctcatggctggatggggtggcaatatcttccgagaataccatgcatggtgggtttggggaccatggatcgcagacatcaccggtggattgtttggcgcattgatctatgatatggctatctttaccggtggtgagagtccagtcaactatcccccgcggagacgaaagcgggcataccgtgtgagagccttgaattttcggaagaagcttcgtattgggagaaaaaagctgcccgatcttgaacgttctgttgcagctactgagcaatgagctatgttcttctatctatgcataattattaattagtatagttactggttatagatttaaaagtgaaattactgggcctaagaatcttaggttgcttcatgtacatatattacagaataattgaggatatagctattcttcactcgctcttctctctgcaaccgccgtctccaaaccagctgttacctcgtacgcagcccttgggactggccggcaaatatgaccggaacaggccaggctggagttggccaagcggagtgcgtgaaggaacctaggcacgtgatatataccacagaagataaagcagtgttagaatttcaatagtcttcattgattcactgtccctcattgtgtcttttacaatgtctccaagagtattttatggagtctcgggactttccggtctacacagtcatctcggaagatcccgaatgtagatgtccctgcgatagcgattatttgaatcatgcggggtcgagcttgagaatataagaaatccctttttctgaattgcttcttaggttctgcaacacaatatcattttgcctcgatatttatttccctttattttgctttgattgtctcaaagtaaccatgactatcggaagaaagccgcgcgttgtttccctcggggagcctgcattcgtgggcagtgaatatcttactcaattcaagaccgaatttgactattccgtcctccctgcaacaaatcgcgaggaagcccaggtattgctacccaaagacatcaacgaaaatggaccgatagacgcgttcatcgttcgcatgggtacgccaccctacgagccactcgatcaggatttttttcgagcactagcaccggggtgtaagattatcacttctgctagtgccggatacaacgagttcgacgtggactggatgacaaaccaggaaattgtgttttgtaatactgtgaatgccgtcgctgaggctacagcagacatggctatatttctgatacttgctgttctgaggaacactacaaacgccgagcggagtgcacggagcgggatgtggaggaagggcgcaaacctggttcctacttgtgatccgtcgggattgacacttggtattgtcggtatgggtgctattggaaaggtgaatagtccgaagtccattgactcggagcgctgctgacttccttctcagtacctcgccaagaaagccgcggtcttcaatatgaagatcaagtactacaatcgacaccaactaccggcctccgaagaagcagcgtacggtgcaacatattgccagtctctacatgagcttctgcgcgaatcagatgtcgtctccttgaattgccctctgaatgcggcaaccacgaatctaatcagcgaagccgaattctccgctatgaaagacggtgtattcctcattaacacggctagaggagcagtcatcgacgaaaaggctctcattgcggcacttgagtcaggcaaggtacagcgggctggacttgatgtttttgtgaacgagccgagtccgaatccctactttttacaaagtgataaaatcgttgtgcagccacatttgggtggtttgactgagaaggcattccaaaaagccgagagagaatgctttgagaacatccgtgcttttttcaagactgggaaggcaaactcgccagtgaatatcaaagtccaaaccccctgagggtgatagactggttcagtgagagatatcagctcagttcagtgcttagctagtagtaactctaaacaggaatataagattattatctactcagccctccttatccgaaacaaagtgtcaatctatagaaatagctctccttcgctatcgttcattggacttcggattctcccggtatgttatcaggggcggtttctcccgattcgcatttgagaatattcgatctgaccacagattgggttagacttagtttcgcattgcttaaagtgcgcgcaagtcgatccttatgtgggaaatgtggggaatgcctggcaacatccgtactccgtaattgtaagtacgcgacaatgaggataggggcgaactctgatagaccgtcaataatgcagttatggacttcaaggtgtgaaagaatgattgaggggtaaatgttagatcaagtcattggtcacgttatctcaaccgttttatctcccccgcgatattgtcaaatcaacattgtgtctcattccagcattttgaatcatgagacacgcaccaaagcgaccaagagtcgggaagcggacgatactggcttgtatcgaatgcaagcgcaagaaactaaaggtcagggtcgcccgaagagtgaaagagatacgtaggctgacagatgattagtgcaatgggcaaacgccgaaatgtaaccattgcctgaaaaatcaacatggtacgtcaattactcttttgggttggtggctttatctgatgtggcgcagaatgcctcgtggaagaccctgccacagggctgcgtcgcccgcgtgactacatgcagtcgcttgaatcgcgtgtagtttatctggaagcgcttctccgagaatcacgtccagatatacctttgaatggagataatcagcatgagctcagggatatcgagtctaatactccgtttgttccaacaacctcggcccaggcaccggaagctccaacctccagccaattacaggactcgccgggggcatacacgagtccttcctatatgcaagaagcatcatcatcatcatcaattccaaaagagcacgccgggcaggtcgaccatctctcttcggaagttgccctactgtgtctcaatgctgcgggtggtgagccccactatttcggtccttcatcggcggtcttattctcgaggatcattagtgcaacaatgggtctcaaaagcgagaaatcgtcatcgtcgccgcgtacttttgaaggctcggaaagaagccatcctaatgcacggcctgatagagtaccaggactaccatcaccaagtgttgcggctaatctatcgcgggcttatttcgataatattcaccctcagtatccttttctccaccgaccaacattctgcaaatgggagctggatgtttgcaaatctagccagtcggtacacaatcctgccgccggagaggttccactatttttcgtccttatggtatggccacctccagtggatttaagatatgatctgacgatattgacttatcacaaaggtctatgcaacaggctcccttgtattgaatcaaagtcagcacggtgccgcagcggtatgttctacttgaccacttgcgtattcttgattgctaacgctatcagatgtactattccatggccttggattacctcccctcagtccttgcacttaataatctggaatcaatccaaagcatactatgttgcgctgtgtactcaatcagatcacctactggggccagtctttggtattttcttcccctatccttgttccaactcaaactataacgtcagtaataggaaaatatcaggcatggccattcgtcactgtattgagctaggataccacagaagcgcagaaagatatcgcaaacatgttgatcccttgacaaaggaaatgtctagaaggtgcttttgggtcgcatacgacattgatcgtgttgcagcttttaccctcggtcggccaatgggtatcccggatgagttgatcgatgcagaggtatgatataatctgtctaataccttacttcgatcttttaacctcctataatagcttcctatggatattgaagacgagaatattactcccagtggcctgttggcgaacccccgtgctaccggtaaccaggtgccaacaatcatgacaggcactcttcatgttatcaagttgaggaaactatgggcaaaattccatgccactctctattcacctcaattacaatacgccagtacgggtagccaatttgccactgttgacactctgcgccaagaattggaagaatggcatgcatcagctcccacacacctggactattcatcctctcatcctttatcggtgtttgcatcaaatgaatggttccaaattgcctacaatcattcaattctgattctttatcgctcacatatcactagaattctgggtgaacgacagggatctggcccaaacgagtcgaacagcaccgacttcattgaagaggaagaggacctccaaagagcattcgaaaattgctcccgctgtgctcgtgaaatatgcgtgctgtatcgtcggctataccagaaatcaagtgttcaattcacttggggaagtctccatattctgttccttggcgggttgacatatttgtattgtctctggcggtcatggcgaatacgccagcagactaagcagagcgagatattaaagacatgtatggcctgcacaacagtcttggtcattatagctgagcggtggaacttggccacatcgtatcgcgatatcttcgaaacactctctgagaaaaccatcaacatgatctgcggaaatgataagcttgctggaccagcccctccacagtcacaatggactgccccttatgacaatctcctttccccaagagactggagtttgggctttgatgatttatccatgcctcaaggttccgactggtttattcaagagtttttacaacagttcccagaatcttaacctgatgaaaccgaactaagagtcgaattgcatgtactcctccaggatttaaaggccgctcagttatactcagtgaatgaaaggcggcaaggtgtgggcaaagctctcgtgcggcctaaaatatattttgaacgtacgaggtcgtctagtatgctatgaccatcgatacacgtcatagaaatcgttcgaattagtttagtagtgtggactaccatagttctgcgatccaaattaagcggcggctagctagggtctagggtagggacttataaattcttccgttgaaacctttcctttctttctcctcaaattctatcttctttctgatactaaagcttaccatacaagaatcgttcaatcgtcactaaaatgtctgagctatctgttgaaggccaagagtcgaaggcagtcccctgctaccacgaccaccctccgcaatacgactcatactatggaagccaagacttactcacctctatcattgagaacgagcatactgtccggaaattagccaaacggatggatgagttgaacacaaagataacggagatagccaacataagagaggagctggagaagaaaacattcctggaaactccagcttcgaatcttaccactgctgaagattttgaggagttaagcggggcattcacagagatagcacagataatgaccgggctgtcaaatgcttgcaaagagcgcgccgttcacaacaccgatctctataaggccatcggaaatctcaccgataacgagctcgagcggacttatgattctttaaagcgagacccagaccggcagatccgacatgagctggctcaggaccacaaagaccgcagcgacagagattcaggacacaatttacaatgctcttcgacgaccaatccagtagagcgagctggcaattgcacatacaactcttgcagccggttcgccgagcccttagcaacgatggacaatatcaatgagaaacttccatccgatacggccaatatctcgaaagtggccgatgatactaccgcaaagtcacccgtgagtttttggaagaaatttttcagacgttcagctcggccttaatagtgaagtggaatgagggtttctgaaaggatcagattatgagatgactgatggatcttggtctttatcttgtctggtaccaacttgaacgattcatgcggatgtatatactgccgatgattaggttgtttctgtatggctgaatcaaatttgttctacaacctttcacacatcttgagatacggtcgaaatgtctaatactcaagacttggacaaacattttcttttcctagcttatcatgatcacaaatcaatgaggtctaaaagaatctagctcccgcggacaaagagcctacagtgagcagtgaaatatatgtccgagagaaaagtcaaggtaccctaaggcaccgacggttgaatggtatatatttcataatcacgtccgaagagggcttgtggaatccaaaaccaacagtcaaacacaggaaaaataaaacaacaaagaaaagacaacaatcaaacagtagacctccacctcacatctacacccagtttttcctttcatctcacctcactgaggttcccggagagaagcaaaaacagtcaaaaagccccagaggaatgccgcgaaagcacccttgatcgtacatccgttttcattcatctcacctcgctgaggttctcgaagagaagaaatcggacaaaacaacagaggaacgccgtcggtaccataacccctcatgcgggggcctcgccgagctgcttcaaaccatgggcaatggtgcgcccaacactggccaatgagttgctcgtggcggcgggatctttcagccttataacaagattgcccatgaacgaggggctctttggtgagggagccgagccaggcgttgcgggctttctgggggtcgcgggcccaggcgtcacgggggccactggggtcccgttagctgcaggcagggccaggtcggtatcgtcgggatgtcctcggccgcgcgggccggattcagattttggaggctatgccgcgagatgtcagccgatgtacgaagaagcccccggaggtgtttcaagaatcgagagctgccatgagagctcgcacgagagcttgcacgagagcgaacaggacatgttctacagggatcatggtcttnnnnnnnnnnnnnnnnnnnnnnnnnnnnnnnnnnnnnnnnnnnnnnnnnnnnnnnnnnnnnnnnnnnnnnnnnnnnnnnnnnnnnnnnnnnnnnnnnnnnnnnnnnnnnnnnnnnnnnnnnnnnnnnnnnnnnnnnnnnnnnnnnnngcgaggggacgacagatgtcacacgcaggaaagtggtggttatcatgatggtttcagtgattacctccatgatgagaattttgttgagaggaaaaacatcgagggcacgggaggaacatgatgtactctcgactaaatggttcgtgcctgccgaatttgtagtttcccattgcacgagcacagcttagtctctatctctctccctcaaagttaagaaagaagattgctgaatctgatgtagttgtgttggaccgttgcacacactgccacttcgttcggcatggtaataagcccacttgctttgacgatgtgtctgatgtgtgtagagtgatgatgtccattgtgatggtgtgtgtgagaggaagagaagagaggaagagggaaagagggaaaagccaataaattgtctgcgtagcttcccatgattagagtagttactcagaggatagtaaaatcggataaggatcgagtttaggtcaggccctaaaagaggagtctcgaatatagtgcttgcaaacacttacagcttcgtataatgctctgggagacaccataggcattcgaagctccgagaaggattgtgctccccgccagtagctgctattatagtgatggttaagatcggggtggtagcctatctcccggagaaataagcggtagtaaggagagacatataagcatgatacttaaaaccttggcaaattctactgtctaataatagggaatggttgggtaggccgtgggccgtggcaaaaagcaaggaggaggagtggcataatatacttgatactagatttatggcttatatactatcttttcaggtatctttttagatgtctttttaggtatctctaaagaacccttcagcccgatactattattttttcgcttttaaattcgtactttccacctctttggtacaccatctcacacgcgcaaagatcctctaatatacatcttcggccgcatcttttcctacaataggatcaagatacctgtaccccttgactagaaacttgcgatatagtctttgcttaattaagcataaccaacttatttttaacgccgagactccaaagtcacgtcataggtggtagaatagtgagtcgctatagcatttatactccattctttctagtagattatactacctagggcctatagttcccacgtgactgcatcgagatccccgataaggtcacgtatatcactgtataatcttacacccgacttgtgatcaaggcggtacgtttacgattaaggcgatcaccgttccccgagcaaataaggttatttcaacccgccgtatatcagacaaataacaaccaagcatttttccaccgagacaatccatatactcttccctgttgctaattgatgtcttggcaatttccgactctccaaaaacgggaccattcctgcttacgcgctaatctgctcaaaccaacgcaaggctgtggccaggtcattccagcatttgcccatgtatataaaagacaagatcacccattctagaaaatagatagttactagaggggctgtatatactccggattcctgattgcgaaaccacaaacgacatgtccggtatgacccccacagttccacttccagcatatagtctccatattaacagattgtgtattcagaacctcaagataaacccgcccctctccgcgtgggcgtagtgctgttcccaggcttccaagccctggacgtattcggcccagtggactgcatcaacgtcctctcctggagccacagcgtgacattggcacttctctcctcaaccctggagccagtgacaacaaagtcaccgttatccgccaacgctgtaagccaaagcgtcgtgccgacccacacgttcgcaacagcaccgtctctggatctgcttctcgtccctggtggtctgggcgcgcgcggctcgagcccagaaatcgaggaagcaatctcgtatatccgaaacgtgtatccccagctacgctatcttattacggtgtgtactggctccgggcttgcggcgcgagctggggttctagatgggaaacgagccacgacgaataagagggcgtgggcggagatcacggggctggcggtggatgttgagtgggttcctcgggcgagatgggttgttgatggtaaggtttggtcttcctcgggggttagtgctggtattgatgttactcttgcttggattgaggaggtctatgggagtgaggtggcggggaagatcgcgaatagtatggaatatactcgacatgaggatcctagtcatgatccatttgctgaactgtatgggctttgagggaactatgtgcctacttttgtgttttgtgtggagggtctccactcagttggggaaatgtatacagaaatatatcttctatgctgagacggtgtggcgtgtgcgcagtgccacgtagcgacacgcaaaattgcattgaccattttttagtcttatgtgggctttctgtgatcctttcaagggtttcatgtaaatgtaaaagggcctgtggcataacacgaggctcgccgtagagtatgaagcacatataaggaggcgacgatttggaagtgcccatttcccagataagcaactcggcctttccccccccgattttctagtgaacattgaattctcatagcccttcaaagatcagtagttgcggatgccatggatccgtttctccaccgatttcccatttcgcgggcacgtgatcgcgcgccgttatcgacgcgcctcaatctcacaactttgcgatccgaacatgaatatcccgacgtgtcatcatgtcttactatgatattgactccatcttgacggatgcacaggtgagttagtcgcgacccgcaaaaatgaaccattactaacatcgacccagaaactaccatgtacatttgagctcgaagtacccggactgggtattctagagggcaacgcgggcgaagatgcgagtgctctatttttcactatccggcgacacagattactgaccgatgcacagatcaaagccggaacccggatcgaccttccactatggctaggtgaaatgctctcgatcgggtaaggttcttacctagaagaccagcgtggagtttgttcttatttttaacatggtatttatggctgcagagcgcgtctaggaacggcccgcttggttacgctcgacatgcccgaggcgctctcggagcgggtgatgaacgcactgaaggccgatccccgcacagttgacttgcgcgctttagcaccgcatttctacaaccttagcgagcggattcttgaactcttcgaggaggaagagatggtcgatgttctcagtgatgtaggtggcattatttccgcgactattggttgagctaggattaacaggctcttagacattcaaaaaacgagcggctgagattgccgaccatgcacgcaactcgcgtggtgcggttggtggcggagttgagttccttcgtggactggatgagactgagcgacaatgtaggttatgattgtccttatttggatgggggatggccgctaacagatatggttcaatagtgttccgggctgctcatgaccgggccaaggacatgcggatctggtcaggagaggcgaaacgtaagtaatagtgtttaatagcgagacatttctctgggctctgagctgtgctcgctcaggaaagtgatacattctatgatcgatcggataggtatatgacagagtatgaaggatatgagatggctgggtggagtcgcatagtttaatgttgagacgttgacttccgaaggcgacggagtggagccccgacccgtcgaaagggaaatgtttatttttgtatagccgacctctgggattgaaatattgtttctcctttgtttccgtataggatgattgatatatacacccaagacacacacatcctgccctctatcccaacaccaaatccaacattcaggagaaaccccgcgcaagggccaggtgagacgcgccccacggccccggtccgattggccgtcgacgggcgagagagacaccaccggagtgatcgtcgcgttaaggagccgattgactggaatctagcctcggggctggaaaaagagaaaaaactatttagaaatcaccagatggggatctgatgtttcttccattcctggcctctttccattcttcctctcataacaataacatctacaacatacacaaacattcaaatctagtgcggggccctttcctctctttggagatcgactcgtcacaactcgttggtcacttcaccctcgcgtttgactgatcccaagtcccgctcctcccttgagttggcagcctgagacccctctatgccttgatttgggtctattgcctcgataaacctaccttgcactccacaggttcgattccagcctctgattgctccccacctgcaactcatctgcatccctcgcatcgacggcctgcgtgttacccaccggcgtccaatcaccgtccatatccgagggtccatctattaatcctccgatgcgggtggtggattgtgcaggcaattgttactgtggtgtctcctgattgactaggatattgcacggctgcatccaaacaggggaacggggggcttgacggcacgtcaattatgcgcgttcgctaaaacagtatgccggcagtcattatggatgagaaaacccaaagaaggagctcggccgctggtcagcttgctccttcaaacactcgaagtcccgtatatcatcccagcactgcgcccaaacgcagtgtttcctctaaagaccactcctctagtacgtggcttctaaacttgcttgaattgagttccaacactcagccttaatttaatcggagctgacattgcttcttcttcaagacttatcagaccgtcctcaacatccatcgctttctcgcgtcaaaggtcgatcgaatatgtttactccaccaagaatgagtccagaggtctcatggctaggagaccaatcgcctgttcaacggggcgcaagaaccccagtccgctcatccacatccggtatgtctttcaattgccatcgaccttggctgtagagcacaactgatgattcgtggctagaaacccccgaacctagcacccctactctagtaaaccctgcctcggctctcctgcaggatctactgaaagaagaacgcgcgcaccgaagctcccgaggaaccatatcggaggactttaaagaaaatgctcctctcactccggagaacactcgaacccaggaagaacctacctccgagaaagcccgcaaagcaaacgatgtcttctccgctggccagagaaaaccaaaagagatgggcatgcgggaaatggaccaagtaagttcataagacgcaatccctgtgcactagctgactcgtctaagtatgtctccaaaatgaacaagctgaatttcgatttgaagctcgaggtcttccaccgcacacaacagttggctatgtacgagaaaaagctggaaagaatggcggagatggaagaacaactagcgcacatggatgatttgatggcggaggtggaggagctacgaaccaccgagaaagagaaccagaccctacgtgaatctaacgagcaactccgcaacgaccttgacaagcgagacctggcggtgactgaagccgtcgagctcatctgccagttggaatcgaaacttgacctgctggagaacggccggggctccaggctgtctatgtcgcgccccatgaccgccgatggctctgaggccttagctaaagcccaggccatgatcgagatcccggagagaacctcttccaagcgaaatgcaagtgtcttgaacgtagctcagaaccagtcatcttccgagctacgcagactctcgaaagcaccctccttcctacgagcagataacaaaagtactgccactttgcggagcctttatgctcctgaagaagaaacccagtcgcgctctgcaagaactgaactttcgaaatccgagagcttccacacaaacaacgagatgatggagccggaatcaccgagactgagcgtcctgagtgaatgcagcgagctgaatgcattcgacacgcctatgatgtggcaagaatttgatcagctggagatcccggtccggagaccgtcgtcggtcgcaggcagcttggatagctatgtcactccccgagagcgggaagaaagcagaaaagacaagattgaccggtggatgcagtcccgcgaagacgtaagcgagaccattatcaacagacgcaggaaccgagtatcatccgatgctaccaaggcgagcgttgccagtttctcaccagatctatacgcttctaaacctcgtggacgcggacgactggacggatctctcttcggaggcatccaccttcctcccacccccgacactatgagcacggcatatgctatcggtgcaaaccgatcgaatgggtccgatgggagtattgcagcccggaagggctcccagactgaggatttgttcttccctggcagacgacttaatcgcccacgttctgctggagagatggcctgtccctacagctatggcagtgacattgacgacagcatgcaaaacaactgcaatgatactccgcgcctaggagtcgctgatgagtctcgcactatcctgccctccttcaacacagtttcctccaaagccagcgcgctccttgggcccggaagccccgacaaccctgttattgaaacctttggggatttataccacgccagtgcaaacgaaggatccactcaaacaatcaaacgcgtccgtagccccgccaaagctaagaccccagagccgcacagtgacagcgactcttcaccaccactcacacctcaagactgggttgccgctgcaaagcatccccggtctcgcaggcccagaccgcgcgacacccgccacgaaatccaacccacagatctatcaccaggcactgtcatcagtccagcatttgaagacgacagcagcctcgcttcaggttcaagcgagctcgaaatcaccggtatcccaactctagatatgagcactctggatatactagcgcgaaacctcgaacccacccagccaggccccaaagtcgaagccaagcacgagcatcgtcgacgtctcagcttcctacccccattcttcaaccgctcgagctccaacgcccgccaactccaaggctccccagtcttaaacgacttcgaagacgacttcgacgacggcgctccatccccagtaatccccaaaaccaggacaacaggcggcgcgccccgaagaccagcatcccaaataatcaccgctccaaccgagctatacccctccaaccccccaatccacatcgaagaaccgcccgcggccttcagacgcggattcccgcaatcagcaacaatgtccacactagcggaccacggcaccgaaaccctcgcgcgcccctcctcatcccaaggcccggaacacaagcgacgcagctcgctaggaatattcggctggatgaagagcaaacgctctgattccgggcccgggacggagaaattcacggactccacgtccaaagagaaccgggcttcctcgcggctagcttacgaaacgactcatggacttggaattcctcatggaaacacggactccatggagactcatgtcagacaccactccgagatgggtattcagtatgatgactatgcgagacggcctcgttatatgggccgtcgtacacgcaggggctgagtctctctcgaagctgtcatcacggccttactcttcgttctttattttcttacttcgtctctttgcctcggtctctctttgtctctgttttgcttcttcttccatttgtacttcatgatacccggccctgtataaacagtagcgtggctacattcctttgcatttcttttactcttcatttgaaacgccatggtgtattatgagatctctttgctttatcttatgttgttactttaacgtatatgaatcacgactatagccttcttcatctttcacgatttattcatcctgtcggcagggtctactgagatgtgttttatagtctcaccttactctacgtaatgatagttcgaaatgaacgaagattcaagaagtcaagtaataattcaatttcctttctcgtcacacgaggacaactagttgatacgaagtgacgggcgcaagctccggcctccatcacttcgtatcaactagttgcccgcgcagactcgaacgcccgcccccacgggtctccccaattctcttccttctcatcgctagacgatgggagcctaaggcccccggcccttcacaccgggcgcgacaacaagggttccgtacacatcagggtttcccctctagtaagagatgggtattagcaagtgcaccgatagagatggaagcagggatatgagaagtgacttacgatgtgggtctgcgcgaggtgccgccgcagattggaggccatgagtcttggcctccccaccttgttgaattctgcgcagtacgggcactggtacgcgcagggagcgatgatctaacgaagtaaaatgaaacgtgttagtgatgaaggatgaaaaagaaaggaaggaaggaagtgaagtgagaatttaggaagggagggtataggcttggggtggatgggatgggatgggatgagataggatggatgggatggaatacgtaccagctccgcgttgttcagaggccactgcgcccgcgggccgtggcagtcgcagagcagcttggcggtctctctgatatgtgcgatattaattagcttggatcaaatgaaagcacgtagacaggtgacatggcgaagatggaacgaaacttacgcgaaggcgtcaggagggtggctgctgtcgcgcgccttccagcggctgccctgggtagggctggtgcttgcagcctgggctgcagcggcagcagtgcttgtgccctgggtagtgccagtaccctgggtggtggcagtggcctggtcagtgccagtagccgggacagtgctggcagcagggacagtgctggcagcaggagcagtgttggtgccctggtcagtgctggtggcggtgttagcagagtttaggagaagaacagggtcaataagctccataaagcgcctctgctcagagggatcgaggtcgtaccaagagccttggtgattaggcattgtggcagatgagttcagtacgtaattgagagatgtactgaaagtgatctggggagaggagagaagaagaggaaaggagagtaaggggaacaggggagtaataaatagagcaaaggcggggggatttcttgctctcacttgaattgccaggtagcaggagtgtcaatgggcaggagcgctcaataggcaggagcgacaatgggtgggtggtgtcattcaactgagcctaatacggaaggaggcaggcacaatatggctttggtgaatgaggcacttcaccatcaatagacctattaaggcttgaacttgacgagagttgatattgattgatattgatgcctaggacacattgtgaatagaatacttgaggcagaagagcagggtcctatacaaaatgtcaatatcaaattcagttaactccaaggcttccagtccattttgttgccaactccaggatttctcacttttccaagacgcccacacgattaacattaccattaagtcaaaataccccaaaacaaaagacctcactatctaattagtccagcttaaagcctaataccacctatgaccgtcctccccaagcgacttcttcttcggattcaatgaaacaatccgctgcccaggaagcgtatccgcagtgaaggccgcctcaaagatgctagcaatcccacgtttagcatagtgcgcgaaagaatcataatcatccgtcttcccattaatagccgcccactccagtccactaggcgtagtcccatccccaagatcactccaccgcgtaacaacaatacactgcttgaacctgcgatcatccagatcttcagtcaacttaacctcaatcaaatactcagtcggacactggggacatctccgcatcggccggcagaacccacacagcgtcgtcagcgcgttcggatcaaacgcctgccccgccatgcggtccttgacccggtgctcgagcccttgcaatccgcccgtactccgcggccgcggaatatgctccagcgcacacttacatgccggcatcagctcgccgtcgcgccagtgcgcgcacgcgctaaagtacggacagtagtcctcgcgcgagtgaagcagcatgcgctgcccggacgccgttaaacccggcgccgcgaaggtctggctggtgacgcggagtaagagcctgccggcgtggacgtggaagcgtgtgctgtgcgaccagttgtcgcgctgccagcggcggcccagcgattccggggccaggccgtagctgggaccgaagcggtgggcgcgcatgacgagctgcacgaatgtgaagggcaagttgcggccgtgcgtcatgcggtgacgaggtggggggttcaggacgtttgtggagtttgggcagtcgaagagcgggtttaggatgtgggttgggcggatgcgttcggttccttctttcgtgcgtctgtggtactttacacacgggatgcaaaggaggtggtgtgggacggagatgtccattccgacgaggaaattgatcttctcgatttggttgtctgggtgcgctagagccttgaggtatccggagcctagtcttcggtataatgtgatgctggccattgctaggcttgcggcttcggcgggattcaggtatcccgctatatgtgcccatagctttggtggcagacttgctatatcgccctcgcctggcggtcgacggtcattgtgctcgtatgttggagggtgaatctcgttgacgtcagatgttcctagcgtatggatgatttctgtgtagtcccgtcgctcacccagttggctgtccacttgcgcatgcaattccttgtatttaagtctatggagagccaatggagctaactctggcattggaggggcttcctcgacactggtctccacggccagccgtaggtctgtggaggatgatctgctgcccttgcggagggtttggcgggatttcttgggacgcaatgcgttggagaaaaacgacttgaagccattcttctggccagggctttctgccgacatcattgaggtgctaatagatgtaagtcttcgaggcctagatggagaatattagggtctgatgtttcggatgtctgcggtgatcttttccgcattacgcgatccgcccggtcccggtttaccgcattagttgacatcaggagaacaagaaatagtcaaacaagattcttatattatcaaatattgtatattgaaaacacatgctacaatacatatcaagcgcaagacatcatagcagcatttacaaatcaaatacagttatttaagcgaaacgcttctcgacctccttccagttgatgacgtcccagatggcggagaagtactcggccttgcggttctggtattggaggctagaaataattagtacggatattagatcattaaagaaggacctcttactagtaagcgtgctcccaagcgtcaataccgaggagaggctcccactggccgacgacggggtcctggttctgttaaggggttagtaactagaacaattcaagcgagaatcataacttacggcataggtgcggatggcgatacgtccggtcagcttgtcccgcacgagccaagcccagccactgccctggacgccagccagagcagcgttcatcttggactggaactcgccgaggccaccgtaggtggagtcaatggccttggccagagcaccagaggggggctcaccaccgccggcactcttgggggcaaggttcttccagaagagagagtggttgaggtggccaccaccgtggaagttgacggcgggcttgagagcgatctgagcattgatgtcacccttagccagggcggcctccagctgctcaacggcggtgttgtagccgttcacataggtcttgtggtggttattgtggtggagctccatgatcttgccggaaatggagggctcaagcgcgccatagtcgtcttgttttagtgttagttttagaaatttactctaagtatgtagatacagcttcttgaagctctaggtgatactgaagcaaccaacttacagggaagatcgggaagagtggccttgccacgggtaaaggtcaagcccgcagctccggccttgaaggtagccgaagctcccgagcgaagggcaacacgggccgagttgttaagaagagcagccattgtgaatgtatgtgaagattattatgtggtgaagataatgaggagggtgtcaattgtgaatggtgaatgaattcaaaagaaaagggttcgcggcggagctatgaagtacttaaccgactataacgtcatcttgttttcgtcggctcggagctatgttgttccgagccggatccccacgtgaatttcatgagctctggactgtgactgattgttcgtctaggacactacttgcttgatcttgcactttttgctgaaaaagaggggacagttgatttggccacaaactgccaatgaacccctaaaaagatggagtcgccttcgtcttctgggcagaagcgcaaggtcgctgacatgagctccgatgaagaaaccacgcgcccgaccgttggctttcgggggttcgccagagctgcctcgcgctctgtgacacctcctacaatgggtggactgggtagtggaccccgcaataaccgaaacaccatggccaaccctcgaggtggaggatcgtcacgaggtgggaaaggcatgggaggtggcggtggaggaggacccaacagcttcgccgcgcgcatgatggcaaagatgggatacagggaagggcaaggtctcggaactactggacagggtatcgtcaacccgattgaggtacaggcgcgaccccagggtgcaggcttgggcgcagtgagcgagaagtcgaaaaagactcgcgaagaagagcgccgagcagctgcacagaagggtgagattcttgaagacagctccgaggacgaacgacagcgacgaaaaaagaagaaggaggagcgcaaggcccagagtcggagcggcacaggtacaccgatccagcgtgcgaagcccaaattccgcacagcgcgcgaaatcgaagatgatatggaaggactggaagttccaaatgttctcaaatcactcgtcgatgccaccggaaaggagcagcgtgttctcacttcgactgctggcctgatgtccacgcaacaattcgtcagtcaagaggaaggagaagcgttaaagatcgccaagcgagctcgaaatgacctggaagcatttgcggatgaatggaaggggctgaaagagaggaaacaattcattgaactcgaagaagcccaggtcgtggacgaattggatgcatatcaatcccggatcgaccatctcacaggcctaatcgccgcagtggaagagctggacctctttgaacacgacgaaagtatcacggccaaatttgatgagatgacggataagcttgaggatttggaatccaaatatcgagatgctgttgatgagcagcgacttccagagaccgcagtcgccgctctacatccgttattccgccaggctatggaggaatgggagcctcttgaaaatcccacattcctcgtgtccaacctcactcgtcttcagcctcttctgtctcgcaccaacaagttagaagagccccggaaacgggcatccacttcaccttacgaaacgatgatttataccctctggctcccacgagtgcgctcggcacttctgaatgattgggacgtttacgacccgtccaaggcgaccgcgctggtcgtggcctggaaggcaattgtaccgccatttgtgtattcaaacgttctcgaccaattgatcattcccaaggtgggcctggccctcaaaaattggaaacctcgagctagccgacgacacgccggctccgaacaagatggaaagttcccctggtggcttttcacttggcttcaatacctggatgaacgacacaccaacccgaaacagcccactggtctcatgtctgacgcgaagaggaagttccgctcggtactcgacacatggagtctgcgcaagggtctggtcgatcgcgttgagatctggcgggatgccctaggatccgaattcgatgtatgcttacgcaaccacctgctgccacgtcttgcgcgtcatcttcgcgaggacttcaccgtgaatccgcaaaatcaagatctcacagcgctcaaggatgtcttgtgctggaagccattctttcagcctaatgtcatgggactattgctggtctctgatttcttcccgaagtggcacgagattctctacatctggctcaccaacaaccccaactacgaggaggtcggagcttggttctcttggtggcgcactcagatcccggaggagatcaacgagctcaccatcgtcgatgatgagtggaataagggcttgcaaactatggatcttgccttgcagctgggcgaccgtgccactgctgaactcccacgcccaaccacggcacagacgcttcctacccgggaagataaggtggcagcagctgcagcaactgccgcagcggctgctcctgaaccccgggttaaggcaccggtcgtggaagaagttgcattcaaggatatcctggagggctggtgtttggaggagggacttatcatgctacccctgcgtgaggctcatccgcaaaacggccagccgctgttccgtattacggctagtgctacgggcaagggtggagtcgtggcttttgtccaaggagatgtggtgtgggtgcagaataagaaggcgaaggagatctgggagccaatgggattggagaaccagctagtagagcgtgcggaggggcgatgaataccggcaccatactgtgcattaggtggattgacattgtaattgaaccaaatgtatctattcaagacatacaactttagccctaagtggggatgccatggtacattgcagagggtatgtaattcagtgttgtaaatacttattccaccagtattcaagtaggactgatctcgatgtcttccattatgtcatatgtgtgagtaggaagaaacaactatgttacatcgtgctattctaggattgaagatgtaacaatgctgtaatttactgtgcttcaacaatccacctaaaatttagacaggtcgctagtttctactagtgcaacctaccttgcacaaactgccaagcaattcagaaaaaaactgtgcaatgatgcttagctgacacgtagttgtcccgttgtggaagaaatagaagtccatagaaggccgtccactgttctgaaaagcgtaattccgctcggatttaaaagtctcggggtattcgggatctcggctaattggccaagatgacaaactccatggaatctcatccgaatcctcggagctaagtgtgcaagaggacctccccgcttaacggatatggagtactccttcctcctcattggtgcttgcagtccaggtgaatattaagacgggaaagccgcaatggttccacggtctagaataacatggtccgccaatgatactcctccaaatagactagtggagctatagatctccaacggaaatgcgggatcgccggttgcagccaatcacctcagggccaaaggtaatcaccgcatccttcaccaatggaatcggcgggatttgaacttgcctcgccgcctaagaggacaaaactgatgtcgtgcagatcccataccttcgtttggctgtcagcgctgacatttgaatgtcctgtgattggccctagacccctccttggcgaataaacctccattattttctgcttggcttgcattaactgtgggcttttgcttatttttttttttccatggcgcttgggttgagaccagtgagcgtccgtggcactgggatgttaaaaggggtgaggcgtggccgatcgttggagtggatttctttcttctcttcttcatactttgtcctatagtcattgttgatatccgtcaaagactaagacatcaattccggatccttctgctggaccaaataaagtgcaatcatttcccaactttgcctttctctctccatctctctcgccagcttgtaattgcgtggtggacttcctacaccgtaccttggagatatctagaagcatatcagtttcccggatcagcatcatggccttgctcttcatcaagcgaaagctattccccacaaaggatgcggacagaatacagtcaggttagtaaggaaagagcatacacccaaagagacatatacttacaggaattcaattcaggcaagcgcctcctcgcccgcattgagtccgacgataccatccgcgcagactctgagcaagacctcgagtcccaaaacggccgctcttacgacaccttcggacggtgcaacagcccagacgaatcagcaataacaaccaacagcaactgcagcacccgcgagcgcatcaacccacgtatcatctcagatgccatcctcggcctctctgacggtctgaccgtacccttcgccctgagcgcaggtctatccgcactcggaaacaccaaagtggttgtgcttggtggacttgccgagctggcagccggagccatctccatgggacttggtggatacgtcggcgcaaagagtgaagcgtaagtcatccacatctggcaaccaatcagcatatgtactaacaaatactagtgaatcatatcaaacaatcgtccgtgaaacacaagagttgatccaaacggactcggaagagacccgcgccatggtgcgcgagaccttctctccgtacgggctctcggactcggcagttgcggatatcacgcgcgacttgcatgcgtctcaagaccgcctgcttgaattcctgcttgctttccatcaccgagagatcgctcctgactgtaaccaggcgtggacttcggccatcacgctcgcgctgggttattttattggtgggttcattccgcttatcccgtacttcattgtctcgcagatcacgattgcactgtactggagtattggtgttatggcgattaccttgcttgtgtttggatatgtcaagacctgtgttgtgcgtggctggtctggccgcgctaatgtgtgggctgcgatctggggcggaatgcagatgtgttgcgtcggaggtgtcgctgctggtgctgcgatcggactggtccatctcattgatatgggtagcacttgatgacttggtggtgatggtactaatgatgttcacgttgcaattaagcgttcatgcattgcagcagtggggtttttgctttctctctactcctaatgtttctcattttttttagctcggcagcgggcgtttcggggacaaagctgcaaaaagctttatgatacacgtttaacgaaaaaataattcatttcccattgacaatctcaagttacatttcaactaccaaggcattactggccaccttagatagttatatagatatataaaacacaaaaccctataaacccaatcccaaatcacccactcaacgcaatcccaaccaacttcttccccttatccgacaactgaatcttcaaagcctcctccctcccacgctccgacatcttcccccaagtcttcctcaaaatgtccaccgtcttctcctcatccgcaagctccgtctcaaacttatcaaactgatcatccaaaaagaccaaacaagcaacatcctccagcgtctgcgtatccggatccccctgcttaagatccgccttgcgcaccagcgcgcccactctcgccgcctcctccgccgaatacccactctcaacacagatctgctcgaccagcgcagcctgtcgcctctgcagtcccgcgcgccacgaatggtacccgatctttgtggcggggtagctgtcgcgcggcacttcccagcgacgcaggtgttgggcgcggattgcgaggcgcaggagctctggggcggaggggttgagggttgagaggtagctggtcattttctgtgcgtagtggagttcgtaggggattgggccggtgggtgtttgggtttggcgggggtcgtcggcgtgcgctgcgtcgatgcgctcgagggctgcttcgtatttggtcatttttggggggttgttggggtagatgggataggtggtttgttctgagtggtgtcgttttaggagaggagtttgcgcttgggatcaattggatgtaagagcgcttgaaagctgggtggtttgatatgagggttttagataagaatagacgctagtccgggtgtggcttggtgtgcattgtaaatagatgtttctaattggtcgagtatgtattggatccacatttagttagtcccttgtacatgacgaaggcggtagtaaaagcggtaacccgattagggtcccgaggtcctagagcccctgaagtggtgatctatgaaagcaaactagttaacaatgcaaatagaagagttgggatgactgtgtggagaaaagcagttaaactacatagcaggtcattttgaagggtccacttgtccagactgtgggggatgactaataattcttttgcttgctagttagttagttaactaacttacatcccatcacatccatctggactctgcctgacacaatacataaagaaaacttcgatttatctaatggccatcccatggagaatatcgagccgtgctatccctccgaggagcattatctcaccgctttacattatctccaggaacatgtctacccagatggaccagcgcctctatatttctaccgttgatgctgagccacttcatcgctaccgaaaaggtggctaccacccagtcaccttgggggaatacttgaaagatggaaggtataaggtgttgcataaactagggtggggaggctactcaacggtttgggcagcaagggatcaaaggttgtacaagctggtgtgacccgaaatagttctagctgactgaaaacagggaagagacatatgttgctgtcaaaatttcggttgcagaaactaaatatgacatgcgagagctacaaactatgaaagagttggcatcttatcaccctcacacggtacaactgcttgataacttcgatctaaagggcccgaatggatctcataaatgcctcgtctatgagcttctcgggccgaacgtcccagatacaattgatacacgctttccagatgggagacttcctgggaagcttgccaaagttattgcaaagcaatgtttgatcgggctcgatggtttacaccaacgaacgattggacatggaggtaaatcacttttcttagagatgctttatatggtatggcacttacctagcatagatctgcatacccgcaatttagccttcactatgccttacatagacgatttgtcggaagaaaggtttattaggatgctagggaaaccagatattggctttgtccaaaaacgcgaaaattgtgataggaaatgcctagaacttggcatacccgaatatattgtgaggcctgcctcgcgtcagacgctttggaatccggctcagactgtcaaaatactcgacttcggagagtcgtttttacacactactattcctaagacactacacactcctttatctctccgagcaccagaagttatctttcgggatcgcattgatcatcgtgttgatctgtggagcatgggctgcatggtaggtgaatccacttgtaatccttataaaccaaagactgatatgttggcagctctttgaagtgttcgcaggccagccacctttcgacaccttcttaataactccaacaattctcgttgaccaaatgcgagaaatggcaaccgacagtctacctaaaagatggcaaggggtgtggaatacgatgaatgcagaggagggcatagaaagtagcggacctaacttacaggaatggctggaggatgtgtacttcaatagcccgctgagtcccgatctcacacgggaggacatagtgaggctgggacaaatcgttgggaggttattgcatttcgagccgtctgcaagagcgtcagcgagagacgttcttaatgatccttggttgaatgagtgatcctatgactatttgttataacggggagctgtcctcattcgtactgtacctagaaattttcacttcttcgattatcaagtctgcgtgctgaaaatagtctctcttcttttgcatcgaccacatcaataactacccaagaaatgtatgcttcacatacaatgaccctgacggctaattatcactgtaagaaacatccaatttgaattaacacatctataggatttgatctttcccaaacgctttgaacagcaaagaaagacacctacataacatcaatatccggccgatgattaacctgcgacgaactatttcgggaccgagcactgtcgtaattacaacacgcaacagcaacacatattacacaatcacaatcacgacgaggtgctgcccttttgggggaacacaagcagctcttgcgaaacatcagaaggcgtcctctccacctggtaagccttgtccttttcaaagatccgcgccacctcttccaaagacagacctttagtctccgggaagaggaagtagatcgttgccatgaaaatcacaagacagcccagatacaccaggaagtatttccagtggatggccgccaaggccacagggtttatatactggttgaagaagcaagccatcgagtcggtggtgagtgtgatggcaaggcccttggcgcggagctggaagggcaggatttcagctgggtatgcgataaacaagggcatatatgccatgtcgtaagcactgcagaagaggaaaagcatgggtaccaccgcaatgccagcctccagcacatgcatctcttggaaaagacccgacatggtcgtcgcggcggataggtagatgaacatcaacattgtggcgattagccagagttttcgtcgtccgtatcggtctgcggccattgctccgccgactgcgaatgccaggttccacacctgcaagctgatattgatggcggcctggtgagatgcgttgtatataccgactgatgctaggatcggggctaggtaataagaaaccacgcctagaaaaagttggttagaaatcggattagaataaaagggacattttaggttcataccatttccagaccattcttgcatgaatcccagaatcacgcaaatggatagacgatgcatgttgctccgggatgcaaagaagctgctccagcggcggcagctcttgtcagactccgcattgatgctcttgcaaatctggtagaattcgtcctgaacaagttcgtcgttctcatcaccattagcgtgatatcttgctagtatagccattccctcatctttcctgccccgggagaccagccatctcgggctctcgggaacaaagcaaagcccaaccaattgaaggaccggatagaagatctgcgtcaagcaggggagtttccatgaccaactccctacgatggtgagtccagcaaaaccaataccagccgacgtgatcgacccgatgaaccaaagtgcattgtataaacccgtgaaggtctgtcgttgacgtgggtgtgttgattcggtaatgagcaatggcgcggcagtttgtgagactccgactccgattccagcgagaacacgagcgaagaagaagacccacggattatttgtggcgacttggataatcgaggcgatgatcactaaagtggaaccgatcagaacgcagatcctccgccccagattgtcggcgatgtaagatccggggatgaacgagcaaaaagatccgagtgagacagctgcgataataagacctcgagcatttgtgtccaggtctttcaaaaaattcgagactgttgttttctttgattagctttgttcctatatagcatgatgtataagatgcctacattcgggaagcaccaggaggccattgatcatgctagcacagtatccagctgtagccgatgcagatagcataaacccaatccctaggtttagttttcgcagccctggatccttcatccagctgctgttggtgttgttgtgtaagaccttggaggccatgtttggcgatatcctgcaaagacagtgaatgtcgtggatgaatgtttcagatcttgaactccgagctgtcaagctcttttatttaaacattgaaaattaattggtaaaagaaaactccgagtgacaatgcgccccaacattcctaggatttatccagggcccgaaatctccgcgcgaggttacagctgtagctaaggagttggaatgaagggagggaagtcaaatgatctgatcaccggacgatttccctgagtttgctctgatccaagagcttggatgtgacacgcctgtcaacatgcctgcttaaggtccgcgattggaatatgagctttcaaggtcttggagagctcggatgtttcaggaatgtttgtagctctcatagctccctcccctcacttttacccacggggatcacttccccggttgcctaagtttagcttgggattcgtagctatagtctccgtatggattcccttgattattggattcgtgatagatcgactcgcccttactcaacgatttgtctctggggaaacggggtaaggaagtttttctctgcagaccttctaggacaagcacgggctatgattttctttcttaggttcgtgagtcaactcggtgtaactatctgctctgcctgtgcgtcacttgatatttgaaaaggtctgaccacggagagtctcgaatctgaaagccatggcagcgtggaatgatattacttcgttctgacgcggacagccttatggcgccaatcggaaaacctcatcaggcaacccggtggcttatggtttccccctgcttagagttgaagcagattcaagaaaataaactttactgtttatgatatgacggttgagtatactactactagtagtaaatgatatcacgaagcatgagttacattgtagattagactgtagaattgatagaatcaagcaacacccgaggttcgtttgaaacgctccggatgttactcctgagcggatgccgatttccatggtcacacagcaggattgaactacccaagtaatttcgactcacgggctagagctcaagagcgttatctaggggggtattcataatattcataagagtgccgaactaaaatccaaggtagtcgattactaaggttagttagggctcggtttgagcttatttggttccaaggtttgtgtcttggtactataaaagcttggaagcttggaagcttggagaaatgatccctgaggttatatacttcatatattacgcaagtatctgtttatgagaagttatctggttattctgcatctcctggagcataaaattgtggatatatatccgaagaaatatacatatcaatgagacgtgcccaacgatatgaaagtcagaatacaacgatcccgtatccacaaagatccaagggcactataggccttacaggagtaattattcgtgatttctgtttctagaacccacatgaatctgtgttgttggcaaattgttgcttataaaccaccgggatgagctgtcaagtcttcacgggattggaagctctagcttcggagagaccccgagacccccaggatccccactaattgaataggggtgatatgctctgactcgtcaatctcattcagccaagagaaactccgcaggcactgccacgatgccaaggcgcagaagttgtttgagacaccggaggccttggcgtgagcttacccttaaaccttagatggcggaagattttttgtcttatctgatcttcatctcgagccctaccttccataccatcagagtcctacatcaacctactcttggcctccccaaaccgaaaaaatgacactcctccacgaccctctaaacctcaaccaatacaaaacaactatatccgagccaaaaaagaactgggtcccaatctctttcagcgacgaaaaggaaaagctcacgggcttctacaaagagcaaaatgaaatgatcgagggcttcctcacagccggcgaggaagagcgcctaaaagccgaagacgaagcccagaacggcggcaaagtaaagctagccgtgcgcgccagcttcacagtcaacttcttcctcttcgtcatccagctctacgcagccgtcacaacaggctctctcgccctcttcgccaccgccgcagatgccttcatggacctcgtttcgtcggttgtgatgctagtcacgtcgcgcatgtcctcgcgcccaaagccatacaagtaccccgttggccggcgtcgcgtcgaaacaatgggcgtcatcatgttctgtgcgttgatgaccatcgtggcggtggagctgatcatcgaatcggccaaggcgcttgcggccggcaagactgagtccgagcagctggatctcgtgccgctggtttgcgtgggcgtcgctatcttctccaagttctgtatgttcttgtactgctatggcttgcgtcggtatcccgctgctcatgtcttttacattgaccaccgtaatgatctggctgtcaatgggtttgggttgatcatgtcgattgtgggtgatcggttcgtctggtatcttgatcccattggtgcttgctgcattgcgctgcttatcttgttttcgtgggcgtcgactgcgtttgataatatgtggttgattgtgggcaagtgtgccccgcgtgaattcctgaataagtgtgtctatgtgacattgacgcacgatcagaggattcagaaggtggatacggtgagttgagaaggtgggtgtattattgacgtttgactaacggtgcatagtgtcgcgcttatcactccgggcagcaactctatgttgaggttgatatcgtcatggaccctgagactaagcttcgggagtcccacgatgtaagccaagcgttgcagcggaagttggaaggtctcgcggacgtcgagcgagcctttgtgcatgtcgattatgattatgagcatgatgtcaacgaggaacacagaccactctatgagattggtggatcgaagcactccatccgagctttggtgaaacgattgtggtctagaaacgaggagaaggcagacgggactgctgtgtgagaagcttcgggaatattgattgagctgggctccaatgtctcggaatgttatacgcagagtatgaatgcagtaaacaaaattaatatcttaatcggttttatgaacgccgaaatagtttctcacagggcaatttgtcagacataaaagcagaacatgacattaacactaccggacgttcaaaaaatgatatcatctcatataaacactaaagggcaggggctctcttcttagcctttgcaaacatgccataaggcttgacactaaaagcgccattgaaattcttcccttccatatcaaatgtatactccttatccgccaactcaaaatccacatctttgataatgcgaacgagcgcatgcaacgaccattcccaagcataccgcttaccgtaacactcccgcttcccgttcccgaaccccttcttcacaccgattgggagctggtcaaaggcctcaccgagcatgcgctcaggcttgaaagcattgggatcatcaaagacagcagggtcacggttgacagcagacagaatagcaatcagaggctgagtcttgggaatttcgtattcacctccgagtatgaccggaccatgagtgggcaacggctcgaggttgaaacccggggctgtggcacagagacggaacgattcgcggaggatggcctcgcagtagggcaattgcgagagatggaagtgttcgatttggccggagggaccgaggagggtgtcaatctcctgacgggcacgagtaaccacatctgggttcttggcaagatagtacagagtgaaggagaggagattcggggatgtggcgctgccgatgaaaatgttgattatctcgtcgatgacccggctgtctggaagggattcgcctgtcttcgggtccttttcgtggagtagagcatgcagcaaatccctctggtctataggcttattgcgtcgcttggcgattatctgcgcgcaatagtcgcgacaaatcttgatatccttgtcgaatgtactctggtacatgagtcgagtgaggagcttgggtcgcgtgggccgacgcacggcttcaaaggtcgtgtctgacattgctttgatgacggcgggttctgcaccaaggacacagtctacatactgaccgaagaagcatttcatattggcagcgtggtttagtcggtccaaatcattagagacatccacgcgctgcccggtgctctctgttgaagtccatttccagatcaagtcgtccgtcgtgagttgtatatccctatgcatttccttgacggcctcgggtgatacgaatggagccatgatacgatgcgcgatgccccagctttcctcgttgtcaaacgcagtaaagagactgtcatggacaagactgcggatttcgacaatgggaccggtgacgcattttcggaagcgcttctcgtcgcaaatttcctcgagaagagcggcgtttgtaatgaagacaagttgcttggtgaggattttgattttgaagataccagctccaccatgttctgctgccagcttatttaaagacgcccaggtattgccagggatcatatcgaagatatttcccagaattggaagcccctgaggctggggaataggcgacggcatggtgtgtatagactagagagggagttgggaatcttcaaaatatggcaacccacttgtacttatcagtaggacgaaaggactcgtcacaattgaaaagtatgcaggtaggagctcgcagctcttgtgccacatgactgaaatgacaagcctctgagtggtccacaattagctttggtgacattgcgatgagcctgaagatttccgtattctcgtccaattagagatcgtattgtcacaaacatcggagaggtgcagctaagctgcagatgaactccataccccgcgtgcccacatgatatgtgatgtgtattgcaagtgggaagatcaggggaagagcgtattgaaatagagaagagtaaggggtagagttggtgaatgctgccctgagaaggcatttgaagccgctgacaaaccaagtagacaagctatttggcatatcaagtacaagccaattacgactacatattccaaatgcagcttctactgtccaatgaagcgtcttgtcatctattgaatcgattgactaattcttcctcgcctcgtcatcgcggaatgatatctccacgctgccaaggccgaggatccaaaaattcatggatgtaaaaaaaaaatgtaaggaagtgtcatgcacactccctgtaatcattgatgaacacagcagaccatcgagggtggccggtagaagaatcatggaaacaagctgcaagcataagaaaccgtcaagaaaatcagaataaccaaccattacagcagcagatctcgaatagctgtgcgcgagatataagaagaacagaaagaaaaaaaaacaagggcagggaataaacaaagcttacgaaataaaagcaattgatcatatccactttggataactttgtctcccgcccaaaacgccgtccgattgatgaagccgggtatatccagcaccgtgatgcaacatgtactgagaatgaaaaaaaagagatcaagaggagggaacgaggcattaagtacacgcgccttgccacagtagcaagactcgagccgagccgtcaaccccatcacccctaggttaatatgggcagaattggtgtttcatcgaaaaaaaataaacagaaacagcttttggttgattcgaaatgatcatagaacccatttcgtcatctggccccaatgccgaacatgcctaccccgtagctagcgcttctttcggacataggggttgacaccttagcgacgtgaccctgattagattaatttttatcaacagaattagttgccatggggatgctttaccttcttgcgtttcttcttcccagttccctcgccgttcgagtagaatccggggtcatcatcatcgtccacaaacccttcgccatagccggcaaagctattgtcatcataatgtcttttgcgacccctgctaggccgtggccgatctgcttcctgtggttgcggagatgggacataggattgggaagagaagcgaccagcaggagcgggaggagccttcttgccaagctcgcctggcgctggattcttagccgccttttcatgacccaagatatcttcccagaaatcgttgttaggaatcggtccgggttccatttgcatggctcgcgattggagattttgtagcgccgaatccatgtctgagaccttgatagctttgccatgcaccttttggttctgccattcctcttcaggccatagagtcatgtacctcagactgccaggggtaccgatctccttcttgacgggtttgtttcgcccagagagtcccagtcctttcagctttccttcgtatgatttcctcaagcggttgatcttctcccctgtcaccggatccatgcgtgctaccgagtgtgcgatcgggcctaacccatagagagagacgagatccactgtagggtcgggaccagtaacgatcggagctgtcaatgaggaaaaagcagtgttaacaacttcagtcccaagaatgtgcaagatcagtacattcatggagctgcacacagtagatggcatgatgcgttttggggaatcttacatctcttgcaaagatgaaaagccgaggttagctctttctgaagagaatcgagatcgagactgagggtgtctgcccgagtcgaccctttattcatatccatagcgtcggagtctgtcgaatgttgaccttgcccggtggcaaagtcagtgctgtctgtttgaaaagattgccgatcgtggtcggtcggtctgtgctgtgttgattgctgagcgggacttgctcccgagttttctgccgagtcctgcatccccatattgaaagattttctccccttatccacatcgtccgaattcgcagtagggtgtccactgacactgctggcgggagtggggaatgcattggtggtgctcattgtgggctgttgggagacttgggtagacattggcgcagaggacggaggggaggagatgttcggagagtggaccgtcgcctgattcggtgatgatatgaagttggcggcatgacttggttcgctcaccgacatcaacggaggtgatatcggggtctggggaatgtggtccgaagaaatagggaaccggatgttctctttcagagacccggcgggcgaggagggtgaaggaggtcttgcttgaaaggaggtagggtgagtgcgatcagacatgagagcccgaggaagagttcagcatgcagagacggtattaaccagagcggctctgggtccgaatcgcaagtttgataccagggcctggagagggggattcccgatcacggtcgacggtcgctcaggcaggcgggcaggtcattcaacgggcggactagatcgtcttcattccaggggactagagtgaatccctgcgagtggtaaagattgggtgcgtgatgagtggcggtggtgaaggagagtgatgatgggagataatcctgtggtcaaagccggcgaggatgacggcgaattgattaattcacgtgaccgggcttggcccgatgtactttattcccattgtactctattgatctatgtacaatgcaggtattcattcatgtatttgtctattcattgctattctctgagttgggtctttattctcaatacaatgcgaccatatcagtccatcaattaactgcaaacaaccctccccttagcgagtggcgagatcaagtaagattaaactttgtatggcccctacatttgccgggaataatcccccgacacttgatcaatgacattacgcgttgcattcatatctgtaggatatgctaatcagattatgccacacctggacactctgcagatgttggtggcgtatcccgggtcttacatgcgtccatttttatcccaaccctccaagtcatgaatagaacagatatcaaatggaacttgaaacaattggaaatggtatctcttactatttaaagactattcgacaaaaacaaagtcaggtggtccaggatgcctttcttggcatgggtgacctacagcccggttggtaatatgaccattcaagaagacatactcgtggatgtcagaagacgaaccagtctaagacagaacatcaagtgatatatcgggaatcaaagcacaacccccaccaagcgccagagctcatcaatataaaatgatgcccgagagagatctgacctcaggactgatagtaagcattatactcattaaccagttgggcagacacgtcgggtatattgtgttcgagggaagccaaaagctcgatttgctcttgttggctgagagtgcgctcacgccatgaaggtactggaaatggctcgtggaaatactgagagtactggtctgcaatggagctggaccagttcatgggattgacggtcgcatcggtgtatgccaaatgaccagcggttgtggaagcaagtgagaagttggggtcccagccttgcaggccgggaacaactgaaggtattgtgttataaggggtgttcgggtcaattgataaatcggggtagagcgtcggcccagagtaagctgctggtgtataatgtggtaccacacttggggctgtgattggtcgctgcatgtcaaatgtacaggaaaccgatggcacttgtggttctttagacgatctagggccaactgcaggtggggttgattcttgcgcaaatgtaggatcagccgactgtgccctagaacaggtaccgtttgaggcggtatcgattgatagattgccacggtggttgttggaataatacgaagcagtcgtgctacttgacgggctggacatggctggaggggtcagtccctgtgaagaggttggcgtaggatggttagaaggcgagtgtacaacgaacgattcttctgtcctgtacgctttcaggcacgcagcaacaaggcgcctgtaaagaaggaaggcagattggacacctggccaacgttcggcggaaaatacaattacttccatagccatatccaaatggccttggacttcctcaatggtgtgctcttttcgaatttcggggtatgagagggtccagagcacagtattcaaagccatgaacagggcttgcacaaacacccatgtcaggtcgacagatccagtgatcatctgttctttatgcatggcgatattggagatggccgcgtcataacaggttttggcagcattgacggttggttcgggtatttgtggtgagggacgatacatgagaacaatgatggtattccgtctcccttgaaacctgtagaagttattgtcagcaaagctgcattgggggaaatgggtatatcaacgaaccatttcacgttgagtccactgccatcatcattcttaggagtagtggccatccaatggtcaattttggccaacatttgagaaaaccatggatcctgatcatcaactgggctctctcgtctgtttgagtagagcattctcctgggctccaattggagcagtcgcattttgaaaaagtgaactgcaatacactttgctagaacgggtttcgctcccggggtgatcccctcggcggtgatgtaccggtcatccaccagttcaaagaatttcacattgatatggtcgtggctgacgcagtagctactgcatcgacccagactatgagaaagaccgaactccattgatgagacgatccaaaataaccttcgacgcatgtcaatctccaatggatttaatggtttcccacacggtgatttggtgacggtggcttcttccgtcaatcccaagtcctgacaaagtttggcagccgtccccacgacccagtaggcagctgtgcgagtgggcgttaccattgaatatgaggcaatgagcacgaggcattgcagagcccctaaatccaatcgttttagtgtgggttccaggtagggcaaggccgcaaggtaataactatcagcgagaccagcatattctgtgctcatcttctgcatgctgatggcgatgaccatccgcagttggaagtttttgcagggatctgtagagccattgaatacctcctctacctcttgtcgaaatgtgggctcgtgcaggagcggaagtagtgcttgtgctatacaacgaatcagtcacacgagctacaagaaaaagaatcagagcaaagtgatcgcagtacctttggccacaaaaagatcaatcaacttataggtcagggtctttggaggtagattgggttgtgggatcgagcttatcatgggatagacttttgatgtcggtttcgagtcttcttgggtgaaggcatctttgatctcttgtgcggtgaattcgggaacaacatccttgatgcttttggagtcggtgttctgcttggccatctccatgaccaatcgggtcatggcgatgccactcgaggcgccgagatatcgcggctcatcgttctccttgaaccggatgcgcccggccccccgcaccatcaactcggcatcggcagcatgttgtacctcgttctcggctttggcaagctctctttctaatgcgcgggctttctctctgagcgataggatgtatgttcgaggtatagttgtgtcgcgggtcgagtcgtagtacacgcacttggcattgcttcgttcgcagggcgcacatcgtggaattccggggtcgcatctagattttcgctgcacgatggattagttgggaaaagcaccaaaaaaaagggcataacactaagggaggagcaaaaggttcaaggtgacggggatgggggagaggggatgtctcctacatgtctacaccttgtgcaggcggtcaatgtgtgagcgatgcgaccgtccggtggctctaatgagtgtaattccggcgactttagccctgtggaggaggagtccggacttggggtcatggtgggccaaaaagggtataagattaaggaagtcgggaaggtccaatcacattatacacgatttatacccaagggacctttcgaagaagcaaattgcgaacagtcgacatgatcttgaggctcccgaggccttgacaagggggagattcgagtttgaagatgtgaaacggagaagaagttgtgtccggaatgggaacgaggccactaatatgcttttccaagggaggggggccctcggtccagatctggagagaaggttgggcgtgggacaaggtgaggtggatatggtggaggcacagagcagctgaaaagagagacctggactagtttagggaatagatggtgtgatgtgggtgtttaatggggggttgctagtatttttccgatagttgatggtattcaacagtggtttatagtggtttaatcgacgtaaccaacatcttcatagacacttcatagccccaagagcaccttagtaataaagacggggagattctcgccgtccgtgcggttccacagatcttccctcccctccctctcctgtcctataacagccggtctcgtttaaacacatcggatttcggtggagttggcttttctcttcaacgtcttcggctaaggcttatttctcgagcattagtcgctaatcctttccctccagggccagctcatgcaggttcaccccttcggccctctatttaatgtcacgtgagtcttttgtgccgttatgtggagatgtgcagggggggagagtgggggtcccatatcctcgaatttactgaccgtgaccagtataatgagcagacatgtccgtcaccgctacgaccttcttggataatcccttgctcaaggtgagtcggccagtcgccgcctgctcgagatgtcgcaccgcgaagatcaaatgtgatggcaagctccccgcatgttcggcttgcgaaagagtcggcaaggcgatcagttgctccggagcaagcgatgaattcgccaaggggaaagagagaagttatgtcgcatcactggaagggtattgtgagaaactcgagaagaagatcagtcagatgcgtgcccggtcaacctcgctgtctgcggagggtgatgggatccctcgggagatgtcaatcacctccgtctcgtcagaaagggcattgggccctgcccaccgcagagaggtttcggacattgacgatttagttggcgattttggtttcttgttagtatggctggattgctttcttgaccccgctgacacttcaaaagatctgtcaatgcgacttcgcgagacttccacggcatcacctcgagtacctccttcgccaaccttctcctctccgtcgctctagtcgattcctccccaccctcctctccgtattcactacctgcgcggcacgaagcaaccccgttgctacaatactatttcgataatatctttgtccagctccctttctttatcgaaacgagcttctggacctcggtggatgccgtatatcagtcaggcggccggttcgccaaaccgttcgatcattggatgctgcgcatggttctcgctatcgcttcggcgtcactctcataccatcacaatgataagagccaccaaagggcatgggctctcgtgtcggaggctttaacatatgccgaggaagtcctccgccctgggtcaatctcgggaatccaagcaatcctactgcttgctcaatattcttttgttgacccagtacgcttccggagttggtacttgattggaatggctgtcaaggttgcgatagatctgggcttgcatcaagatcccccggctgaggttttgactaatcccgaccgacttgatattcgccggcgtgtgtttcattccatctattgtctagacaggttcgtttgtttctgttcctcaattgctgccttgctaatcttctatcacagaggattgagtcctgctatgcagagaacctactcgttctccgatggatctgtaaatgttgcattgccatcaattaccgcaccaggggccctcctagagcagactcacattttcctgcgcagtccgggacctgccttgcatatcgttaaaatccgacagattctgtccgcgggctaccaagaaatgcactacagcgggcgcgatccatccccgcagcctcttgtcctcatctggactctgtgctggcgagcccgcgaatggttccagcaatgccccaaaaatgctccaaaccacttttcacttctgtaccgactagaattattatacaccattatcatcttgatatccccttcacatcgatacccaattctccacgactacagcaaggctctcttattcgaccggtgcatggactacatcagccaaattcaccaggtcctagaaaaccccagcgccctgcccttcctgacatacttggacatccagcgcgtgcaccaagtgggtcgaatatttgtcaatgtcctgtccgacaattacgacatgctcattagcgccgctgtcccagcacccccgcccgtccccgctggcactccagagccgccagtactgggcgacgaggacttgttcaattgccacgcacgtgccatccgctgcctgtcctatatccgcgacatgctcaaatattgcgacaggaagtgggacatacatggccatctagagcagttcgaggacgagtctgcgtccatagagaaaactctgatggatggctcggtgggctacatgtcgagccaagagatatattgtcaagacttgttgtcgggaatgccgctggccggcgatgcatattcggggtaccatatcgggttatgaaagcattttctgtgtgatatttgggcatatgaattcggaaaggaaatgagcgtggtttgtttttggttttgtgaaatacccctccacatgatgtgtataatgaataatatagtgtgaatcggtccaataaatgggttcactacacactggtactttactggaacttacttcgagctgtagtacggtgtattgatgtacaacacctacctgccttacttgcaaggaacgatgctgtgttaatgggcaataactccatgacatcattttgaacttaatcttgcattttaggaatactatttagaatatatatcatgcattgccaattgtaagttaaccattccatcacccacattcaagcctgaaacgattgggctttatagattgctcatcatcataaacatgcacagcgtcatatcccatgttccagtcaactcatagcctacttgagtttataatataccgaggctttagatttggcacgtgaaatcaaaaaccacttgatgctgatcccgatgcggcagaatatactgtagttacttgtccccggtgacatattcttattctaggacaacatatttaggtctacagcgccatgttcttcatgaaaacagcaatgatcacaagtgaacaaagcaaggggaagcggcttgtccgagctatgaatcctctaaccattcccgaggtatgttgtggatggttcaactgcaggaactactgaaccgatccaatcatttacttgtggactttacttgtggacctgggcttgggcagaccggtagttttctagacgtttccacatgatccaaaccagccctaagattcatggagtattgagtttatactatagcacaataaacacaaatgaatgtatagcagtcactgaatatgccttgctagttgattgctgttaaacccgcgaaggccgattgagtctgcgcctagcgagtcatacaatgcattagtccggctcgatccgaggaattactccattcaaagcgagtggataggccaaaatgtcctttgttgagggtggatatacgacgtgttgtatgtactccgcacatacggacctcgggagtagtagtggaaacattgaagtgccttataaaccaaatcgaggccaggccggcgaatttcggacagaatgggaatacctaaggaaacaagcatcttgtgccctagcattcgaagacagcaatggtccatggattattgagttgttatatcattttctcccgatttggcagttaccccttatagttgaaggatatccaatattaaaaacggcaatagatcggaaaaaccaatggatcacggcatagcatgggcctatgatgaaaaaaattcaagatagggatagtcttgtcggcttctagaagttcttattctagtccgatatactagtgtcaacgggaattcaacggggaacccaacagggaatctccgaagtcttctccgttcctgctgatcgacagagcctctctcttgggtgatgtacggtggcacccaagcttttgacaacgcgatcttggatcccaagtcccggcagtggctggcggtacattatccagtggagtcaagtttgaccatcgcctttgttccggtcaatcttaacggccttggcggtgaatcgatcctgagtgaccaatggaagtccgtctccgcagccattttatttttatcgaaggaacgtggactggagacgtgtggcgtttgcaacggaaaggggggccgttggctaaaaatggccaataagggtatcttgaatggcagttaggtggagatagttcggtcaggatgccggctgattggcatttagttccacgctattggattcagaccccatatgggccttttcaggcagttgggttcccctatgtggcgctttgcagatcgttctttgtttctcgtggagtgccactctagttcagagcgagaacgacaacaaagacaaaaagtacggagtgcgtatggcaacaataatggggattccttgacacagatgatccgctatttaaagtgggtttagaatatcagggggtttactgccatggaggtactacaggcgctgagttgtatattgtacatttaggggatatcaccggatgatcatttaccgatagaatctaatttatggttaattcacagagtttactccgagactatgggcaagcccgcgagtataagctcacgctagcccaatctacgttgtaagcccaagtatggagtaactaaacctcgaggttccatgcgccctaaacatgggcatgtagatctcaatttgatcctgtaatccggtagcctccaaactgacatgtttgatttcaagaattctacgatttgggattgtcgcgttatttctagggcaagagtgaggacttcaaagcatgtctaaatcttacggataagcttcaactacaagtgccggacgacaacgccccatctcgtcaatgtttgtagacattgtcaatagtggacagaccccgttgttctggttgattcggtccatctcggcataatggagatgctcgtcccacttaatgcttctctaagactccattatagccaactattgagctgacccgccagtctggatactgctgcttctttgacaagtaaactccctaacagggacaggggtagtaagatcgtacctgtagatcactcagttcatagtgtataaatacggtctttctctgtgtccccatcaaagttttcttcttctccaagcttcctaccacagtcattctttcagcaactacagtcactcttttcagtttttatatacctattaatttcacaatgaaggcctctttcatcgctaccgtcgccgccatggccggctctgctttcgccgctcccaccaccgttgttggtgccgatagcctcctcgtcggcctcaagattggcgacatcaccgcggagctcaagctcagcgagatccccgttgtctacaagctcggcgacctggccaatatcctcgaccttcccaccccctcctcctctatcagcaaagtccccgccgtcaagaacggtcacctcgtccaggacctcggagacgaggtcgacaacatcctgaccgttgtcggcgaagacctcacaaccctcctcatcgagctgtcccccgaggtcactgccctcgtcgacggccttggtctcggttccctcggcgctcccctcggctccatcgtcgcctccgcctcaaacattggtggcatcgtctccggccttggctccgtcatcgacggtctcgtcactgttgtcggcgctgacgccggtgctctcctcatcagcctgtcccccgaggttgctggcctcgtttctggtctcggtctccctaccattggtgtccccgtcggtaccgtcattgctaccgtcggccagaacctcaagcgtggcgagattgtccaggaccttgcccctgttgtccagagcaccatcactgtcgtcggccaggacgccgaggacctcctcatcgagctctccccctccgtcacctccctcgttgccagcctcggtctgacctccgtcgccggccccattggctccgtcgtcgctgaggccgctaccgtcggtgagcttgtcaaggacatctccgttcccgttgcggatctcctccacattgtcggccgtgatggcaagaacctcctcatcaagttgactccctccgttgttggccttgttgctggcctcggtcttcccaccattgcctcccctctcggtgccatcctcaccactgtcgctaacaacctgtaaatgcttaccggcatgttatgactctggttgaataagcttgcttgcgtggaggtctgccatcggtatgactttggtactcactatataatcataagaatttattatattcatctatacaatgtccagagtatttgacacataagggcgggtaatactcatagtaattaatttgttcaggcctctaaatccaatttaatttagaagaggggactgcaacggggacagcaggagcaggtgtgagggcaaagttgtcacttggagtagtagggtactagagagcagaacaagaacatcatggggtgactcctaagaagagaaggtggaagcatcaactagttacacattatgtaaaatatcttggcaaggacgtaaaaacctcaaacagacatcttaatggagagagaagacctgttgcattcactggctaagagagagagagagagtaggttcaggcggggaagcaaggtcctatcttcccgaggcaaacggtctcaacaaatcttctccaagcacccggacaagccgaacagttgatgaaaaaaggagttcgcgtcgaccgggggtagtgtaagcccagtgacactgtgcaacgaggcgtatgcaagcacagaggccaagtcgcgaggtccaaatattagaataatcatgacgttctgcaatgcagaacattcagcgattaaactgaatagaacagatactacacatgatctaagccagaggcaaagagagctgaagaagaaagaaaagaagaggaagtcctgggggcagggctaccttcttataggtatcctaagggcggtcggtttatgccactattcataaacaaatgagacaaacaacgacatgggctcgcttaattaaatggtaacgtgatcgtgagagcaggaacggcgtctcttatttccgcttgacttgtttcacaactgtcattcactttggtgtgaggctataatgtttggttcttctgatatcagcaagagaagggctgcaggtatactaatcttcatccccgtggggccccacgttttgtttacagatctacggataatttaagcactctccacctattggttggcacgggatatatgctttgttctttttgaatctatttacaatgaacagtcctagactcagtttgccaagctatgtatttccttcagttataaggccacactttcgcatgaaaatcccgctggctcttattctcagccaacccaatagattcctgcctgaaacgctcattcgcctccatggcactttcgtagtattcgggccgaacaatgcctcccagcggaataagccctgcgtcttggagctgatgaacaatgcccgaaattccctccaagagattcatttcgtctgtatgtctgagtagctcctcttccccgaaatcgactggaagtgactcttgctcgtacttgagctcagcccagcgcgcgacaagtttgatcaagaagttgcgaagagaaaatagatcttcccggtcccagcatcggggtactaaagaaatagggtcttatttcagctcgtgaagtggatcgttgagaagttgccttctgataggatcgtttgtctttgtgacatcatagtaatgctctagaagcattttttcctctttcatttgatcatcagggtatggcgaggctgatattccagcaatcgcggatgagaacactgtaaaattgaatagaaaagccttattaaactgtccctcgacgcatttgagcaactttacacctgtttcaaaagtcagtattgaagcgattgggtaggtagccacttacaagtcgttccggcatctccaccaggtttagcagaggcattcagaagagcctgcaggttaaatctgcgataacgcattcctagtttttcgggttctccactcctgaagaagttagagtaatacgaatctgctcacaagcgtgacatacaaccaccgatatcgttgatattggaataaatcatcttcctcaataggtcctcggtcaatgagaaatcacccgttccatcctccagcgctctccagagagatatcgtccttgcttgtggcatctgggttcttgttctctcaagcaagggaggtgacttgaggatgggaaaaccctgtatgaagtgtggcctcgtatcaacgtattcatctttggatggtgggctgaagactaaggttgaaggggtagtcgtcgtggtgtcggtgagccacacccctgacaatacacattgtaggtatcgttcgtatggcatgttcgtacaaaaggtacaaactgtagtcttgacttttattttttcgggatactagctatgaaacaaaacatttatataatatagcacaactctgtactgtgcttttgcaaaggagcctctatccccatatgttctttgcttgtatcaaattttcatgtttactgccaatactgagcatgcggctgatacattcggcgctagtgcaattctgaaacattcatccatgagattgtctagggaatactacctattatggaaattgcatagaacaagtatcccgaggtttagagcactaattcgctaagatatgttctaaaaatagaaccgtatcagcatagactttgtacctctactccgtacttcgtatatgaagtcggcggcgtactccgtccgtattacctccttaatatgcccgcatgtagcaaatatagtcccaagtaggtatattacaaatcaagtatctcgtcattagctctgaaatacacaaatgagtattattatattgcttatctcggtccaataacctttggtccgtacctaggtagctagctccaagatttgggtccgagcggcctatcagagcgtcgcctgggtccgcactgtagggtttgcccgaataagccccgcttttattctttgggtaggccaatggcggtcgatatatatcgagtaaattaaaggtttatctttgactttctccgccacctcctgccgtttgcctcgtatttctctccgcaggtcggttttttgcatacatccccttcctccacgttgtccccatctccccctggaggcctctttcgcttcttgtacatatatgcccttctcctccctgtttcgaccgtgcgacttatgttttataattgtatcgcaacaccgtcgctgccaacagcgatgtcctcatgtcccttgccgacattgccggcaggaatttcacctcccctgatcgctccggtgaccaattcgcggtgcatactgtagtcgcctgcctcatcggcattgcctggtacaatgccttggaattgatcgttctgtgtttcaccaccttcaagagatatggcgggtgctatttttggtgtctcctccttgcctccttcagtataattccgtttgggatgggatatatcctcatcatcttcaatgtatacgacaacatgtttcccgtggcgatggagctagttgcgtgggttgggatggtaacgggccagtccctagtcctgtggtctcgattgcatcttgtctgccacagccgaaccgtgctccgcgtcactctcgccatgatcattgttgacgcgatcattctccacatccccggggccgtccttgagctcggtagccattcgaacaaatcttctctcttcaccgacgggttcaacatcttcgagcgcatccaattggtcggattctccatacaagaaatcattctctccattatctactcctgggaagctgtgcgactactgaatctccgcccgagaggccattaccgaggtaccctggtccaactcttgatcgtgaacgtagtcatgattatgatggacgccgccgttatcggagtacaatactctggtctcttcgatatccatgtcaccctcaaggccatggtctacagcgtcaagctcaagctggaatatgcgatcttgggcaaattggtgcacatcaccgagggcggcagcggctcgaccccgaccgacctgtcggatttcgtggatctttccttacataatccccgcaccccgcgaccggatagggacacgatcagagagaacccagagaatggctccaacactcgggtgcgagtcccctccaagggctcgtctactgatccgctacgaaggagtctctccgcccatagtccgagttcgagtaacccggactactcttgatgatttcacatgtaataacgacctcttggatgtttctgtacataaaaagttacttagtatataatgacgacatagaccatactctcaccagtcgagtgttaaatctctcacctataataggaaagtaataacggcattgtcagacatcgccacgagcttgatatcaaatcgagcacggtacctcgtattccgtatatcaatccgcaatccccaaacccactgaacccacctatcgacccacccatacccaaatccacacctctgaaccccaactcacctcatcctatgagtccccgaccaccaagcgcaagcacaagacctgcacaagaccaaaccttcgcagaaatcctcagacaacggaacaatccttctctcctcgaactttgtgcgcgtaacggctggggtatctgacgtcggagaaggcgtcgggggaggttattcctgttggggatatagggaatttggccctggctttgccttgtcgaaggtttttgagagggggcagagtatggtagaggttattaggccgcgaattgaggggcagggaaaggtgcgctgtgaatgttcgagtaagctggggcctacatagtggtgaaggtgtcgtaataatgtatgacgtgttggtgatgccggatagtaacgtgatgataatcagaagtactgattattcttctatttcattccacaagtgcccgagttgctctctgtccatttcctctgaccttcattttgtcttagatttgaagatatataacctctcctgtgcctgcgctggtgctacgtccgagtgactcgctcatttgttcttatgctcctcgatagtactcttctagtgaatgtctagcgaatggagatattccattcaaaccagcaacgagccgcctcccgtcctagaaaagttgaatgtttggacatgcttcgttccttataatgcttcctaccgaagtcacctcggaggtccaaagagtaggaaatccatttcctcttcaagcggtaacagagtcttttccttgaaggcgttgcagtactgatcatcatcgaaactcgcatcggggtcgaggtatccttgtaggcaggtcaaaatagcctgggagaaggcagatgacaatctcccatgagaatttttctccttgagccatccctccgctaggtgaagacccgattgatcacccggtaagatattagtgatttgatcatatccgagtctttgctcaaccggacttccggaagtaatttcaagcagcataatcgccaaggcaagcaagttcgaacaggttctgttgataagtgtaggaccaggtcctgttcctggattttggatcagctgcgatgatttcgaaattgagtcctgaagcaacgcacctcgatgaaattctttcactaaggaagggtatcttaagtcgacagacaatggcatgttactgttggctcttgcgaacacgatgtccctcttactccatttagtttcaagccatggagtatggtttagttgaaaaatcgacgctatcaaggtgatggcgagtccgtacacttctgctatgggtagttgggcctcgaattgcggaaggagggcctcgagagatgaagactgctgaacgtattcagcagcggtctttttcaaggaagggcgtgatgccagaaagcccttatcattaaggcagaataccacaaatggatgcggggattgcctaatgactttgcataagcttgtgacatgctgcaaatttgcagggtcgtggtcgtcctctggaactgatatcgtcacacgaacagttcctgttctcgtgctactttagcgtcatcactagagctcaaaaggacagcaaaagagaacccaaaagtgcgtacctcgatgggagttcgtcaatccttatttcagaattcaaccactgagaagacgcgttgcagtccccacgaagacccaatccaaaacaagtcgcctgcgccaccaagttcaagctcgctgcttgcagaggcctcttcgttttctttggtctcaccagccgttgttcgaggagcagacatgcgacatggacagggttatcgtcacaccagtttcgagatattccttggtgtactttggtcgcattctcttgaatggtacccaatgatgcagaaaatttcaacttcagacgactctgcggtgtttcatcctgcagcttgtcagctctagttgcccaggcatcaatccgttttgtacaagtctccaaacgatctagcgcatccttcacgcgatttttcttcatggtaaacttgatcctccttccgaattcgaaatctttgtgaaggaacgaagtgttcgcgatccgcggattggaaacgacaatcggcaggaggtctttgcttatgaaaccctaccttccaagagagtgctcgaacctgctgcgatccaggaatatcgaggcaggccgctatctcgaccaggatttctgacacttcttctatggtgagaatgagtgggtcgtatactgaccctagcctatcgcgtagaccgtcagcgatgtctccttttctccacaattcgcttcgaggatcctccatcatcgtggtttggtctgcaacgtcggctgccttcagtaagacacggacggcttggtcgtaagatatgtttattgtataaagctccctaattaaccttcgcacatgccgtctccaacgaaaaaaatcttttgtgggagctgccaatttctcgtagttctcgagggcagatataagcagaggaatgactcctaggacgagtccagctacttccactcctgtcaccatcttggattgggaggccgttggcgagataaatcaacatgaaagaaacaaggctcttccctcttcccccgatcgagctatgagttattcccaggagaactaagaagttattcccaagggaaacgtgttaacgtggagtctctcaagttccaacacccgatctcagccgcacgtccttttgtcgtggcatcgaccccaccaacacgcagctcttggcgttagttcaaacgaatggtctttttacattcactcgcatccttccgttattggaaatttgattgtgatcaggcattggagaaaacctcggcgaaccgcgtggatacacctttggttccattaggcccgagtcgactaacaagtttgcaactcatcaactacgaaagataaaggtgattctcacgaggtgtacgaaacaagatttcctgaacctctaagatcgaaaccctagccatggatgacatcggcgttctttctacctcttgtctaagttgcttcgatactctgacacgatcgctgcgcacatcttcggatgagttcaagaaacagatgaggccaatagcaattgaaaatgaatatgcccgcttcaagatttgggctggcaacctgggcgctttacagagaggccggcattctcttgatgctagattacgagactcggtggtgctacgagcagccgtcctcaaattcatgggagagttacaagactctttgagaaagagtacgttgtgccacatctatgacacctcctatcatctctagttggaaccccttattgactgttattgcccaggtgccgagatcaccacaggtcttcgcctaccgtacgaacagggtggcgatgccacacatggtcccgacgaagatgctgaggacaacagtgacactagtggcaccagcagtgacttggagtctgcagaactagctgagagactcgatgaaatcaaagatatcatggagcacctgtataagctctccttcaagatacgcaacacgagatatcgttctctcaccaacaaagctcttctgatgaaagaagaggatccacaaaccgggaaagacttgttctcggcgtatgccatcttcgattgtcggcatgtacaagagtcactcaatcgcttgcgcctgcgtccgtcatcaaaggaattcgttactgaacctgcacgaaacccaagtgacgggtgtttcgatgtgttaaatggtggggatcgcctgttaaatagcgacgattttctacaagatcgcttagcaaaagcaatcaccaaccgcagaaagtattttgcatattggcggagacatgctctcaagctctcacacgttacggatgagctagccccccaacaaaatttcacaactctcgtgaagcctgcgagacctgtttctggacctccaaccacaccctcaatctcagggtgttccctaccgactccaggggcaaaaaccctggtttcaggaaccgatttctccttgtatagccatgaattggacgaccagctggatacagagaccgtgttttcctatgcgacaacagcctacgatgttgacggaaattccccagaactacctccacctcctcccgatgcggccacgaagccagagtttgtttgtcagtattgctgggtggcttgtccgtcgagacaaggaaaaggaaagtcatggcagtaagtgtctaagatcattgacaggataggagcatcgttctaatgaatgttagagaacatatccgacaagatctccagccgtacgtatgtacctacgaggaatgctcagatgccgaccgcatgcacgccagtcggcatgcgtggcttgaacatgaacggctagtccaccgccgaatatggagatgcttcgaacacaggtccttcagctccaaatcgaaaaacggcttgctgcaacactttttagactgccacaaaggtctagatgagcagcagatcgaaaacctcctggatatagccgagacgacggtagccgatgacagacaaacctgcccattctgcttctcgattggaccttttgctaaggggtttcacaaccacgtggctttccaccaggaacaattcgcaacatttgcagtaccacgaaactttgacagcaataaagaggcggactctaaaaaatccgaagggattagatcagctggatctttgtgttccgttgctctagatttctcggacggtgatagcagccttgacagcgacgacagcgacgtatcagtgaaccaactcggaaactccctgctaaactctgcgaatttcggagacgctgcggctgttaggctgctactcgagaagggcggtaatcccgacttaggggataataatggccagacaccgctattatgggcggctaagaaaggccacgaggcagtcgtaaagctactactcgagaagggcgccgatcctaccttaagggattatagtggccagacgccgctatcgtgggcggctgggaatggtcatgaggcagtcgtaaagctgctactcgagaagggcaccgatcctgcctttaaggatcatcgtggccagacgccgctatcgtgggcggctaagaagggccacgaggcagtcgtaaagctgctactggagaagggcaccgatccttccttggcggatacttatgggcagacgccgctatcgtgggccgctaagaaaggccacgaggcagtcgtaaagctactactggagaagggcaccgatccttccttggcggataatgatggccagacaccgctattatgggcgactataaatggccataaggcagtcgtaaagctactactggagaagggcaccgatccttccttggcggataattatagccagacgccgctatcgttagcggctgagaccggccatgaggcagttgtaaagcggctacttgacaatggcgccgatcccgagtcgatagcgtgggcgcctaggtcttcagaatcagattcagaattagacgattcggatcaaggttctgttattcccgaccgcctcgcttcagaggattttacctaaatcaccgtgatttctggggataaatcacgtgttgcagaatgggagggtcacttcacagctgaaactaggcagtctgtgaggcgccatgtcgatctgaaaaagagaaagaatacattcaacgaaacaactaagacgaggagaaggaaagaagaaagtgtaaagtagaagcagccagttgatataaccgacaaacgttgcaagcttcgaacatctcgcttagctatctaacaaagaatctccgaagtaaataatgcaaacagtagatagtcgccgatccatagagtcatagaacagacaaccatgcaaacggtaacacagcccatatcaaaatgtaaatgagtataaaatgttgggagcaattgctcccgagatctaggtatcctgtaggattctgatataatcatggtacgtgttcataactgactacatactacttggtgaatagggatatctatgataggcagtctgggctagcaggcaagacaagagcgacacaataacactaaccatctaagcaggttagctagtaagcatagtcatacagacgacagtaaccatcctgtaaaaccctttcattccgtgtgtggtgtgtaggcgtgtgctctgtacgctgcattctatctgatatgaatgtcccgatatttatccctgcagaaacaaggcaactatcatagttaactagttagttggcactgactaataatgcaatagaggatcaaagatgtacggaaatgggccatttctgttgatactagtactatgtaaatcaaataaactcgatcagactcaagataaagacaaggaggtggatccggaatggaaacgctattctcaatccggtaaggagtgggtgcacagccccacagaagccacacccccttatttggctgtggctgcaagtttgaccttctagaattgtaactacattaagcgcgtcaaaaacgatagcctgtataccgctaccaaggataaaagcaggaatccaattgagtttcttcccctatgtcgtattgaagatccgaagtgttgacgtcaagttgagcagagtctgatatcgcggacccacatacatccatggatgatgatggaacgcgtgtgccaagacttcgatcccatcaaccttggaagttgtagatcttagggtttatggggatgtatgggcttttgggtgggaatctatacccctagctctcggaggaacactaaccttatgcagctaaggaagtggatgacgtgaatctggagctgggtacgtacggggtaccccatccaggtggaggttaatctgaccttacaccttacatatgacacaacccatagagcacccacccagcaaatcaaatatagctgcaacgttctaggctgaaagggacaaaagaaaatcccaacgagactgggagggagcagatgtccgtgttagttgtggccaagctgtgccacgacagagtgacgtcaggtgtcgatcaccgccgtagcagtccctacggaggctctttttatcgcattgggctcctggtggcagggcctggttctggtgtccagctcatcataatggcgctattgtcccttgtcttttatattccgtcatcccttccctcctactttgacttttctttcccttaccacattttccttcattccagtgataccccttgttttgtgcctacataggttcaataaatatagttaattgtcagtgagtgactctcgtttgtcctgtatgcaaacggcatctctgaccctgtcttttagtccatacataatacctcaccccctcatcattggtctgatatacatacttccatcatgtctgtgaacgttcccacaaatcctaaacagaaggagaaggtatggatgacaatgcgactccattgaaaccacactgacagagaatctccaggatatcaaccagaagcttcaattctttggtatctaccatggtaagtccagcttcacatcctccaattgaccattcctgtactaactgtgtctgctatagccttcaagaatagcaagctcccctcggtccgtctcaatctcctaccgccaatggccttgtcacaaatgctaactaggtctcctcccacagaacaagcaatgcgacattgctttgaacagtgtcttgaactccaaggccctcaaatctccaccaaaggagctctcacgcgatggaaaggtccttgtggcagatctgcgcaatgtcatcgacgcagcgaagaatatgctcttggtcaagaacgagggtaacctcctgcaagactttgtctggcaagcccagaggatgtccactggcaatgcggatgccaatcgccctgggctccccatcgacaaggaagccggtcagcaagatgctagcaaggccattgatggcctcaagaccctgggcacgctcatgatcaccaacggagagtttagaaaactacgtaagtgaacttccgttcgcgaatcacgggcattcctaacaacgcgcagtgagcgacgccatgacactgggcaaagacattgcggccgatgcttctcaaaaggccgccaaccaggttcgcccttcgcaggatgagctttcgcagatcgaccaacctgcagaggacaacgtgtggcacgagaaacccaatgtctccaaggatgacctaaagtccaaatttaagaagaacaaggctgtatgtattcctagtgcgctataattcggcacatactgacacttagctcaggataagggaagcgctgcttccgcttccgctggggttgccgaggaagagactggcgtgtcgccgcagagcaagaagagggaattatccgacaggaccaaggcttacttgtccgagaaagttcccaaggagcgtcgcgagcagaccatctggcgcctgaagaagatgatcattgaaatccagggtcatgaagactgtaagtcacccacaatctatatcgacggcaaagatttactaacaaattatgcagaccagcaagccgttgagaccctattgaacatggctgagcaatacgccggacacaccagagacctttccaaggagggcagtagctctgcccgtgacgtcctgaagagcgacgatgttcaggctgttcagtacaatttgcgcactcttatcgaacgctttgccaaccacacctctctagacggcttcttcgaatcgctcaacgccatttaccgtgaggctgagaaggaccccgaactccgaaactggttcaagaacgtcagcaacttgattcggtatgtgaattagatgattttccccaggataaaagctgaccggacatagcaaatctctgcgcgaacagggcttcatcatggaagaggaatgcaaccgccagtggaacgatctttacgacaagggccgttacctcctgcgcgagcgttaccgcggttactccgaccgcattgtcgacgaggtcaagttcttgggtgaccaatttgagcaggacgtgcaaaaccaggcccttgccgagtcgttccagaagctattcaaggatctgggccacgattccagtggcaggcctacctttaagccggatcttcttcgggatctccgcgatgtcatcattccgcaatttttcgagaacgtccgctatgttccaatcccccgtattgaagtagcggatcccatggttgatgttgtaatcgagaacctgtgcctcgagggcgacaacttgatgcccaacgttatggagttcggcagcgacaactacttccgctggggccgcaagaagatctccaacaagagtgataataagatcatgatttccatgtctggtatccagatggatctgcgcgatgttggatactacatcaagaagaaggagggcttccccaccatcaccgatcgcggtattatggacatcttcctcggcggcgacggtctcagcgtgaaactcgctgcctctaccgcccagccgagcgacaaggagcacttcttcaagcttgacagagtggatgtgaccatcaggaacatggatatcaagctgaagaagtccagccacaagctgctcttttacaccttcaagcccatgctgttccgcgtcgtcaggcctgctctgcagaaggtcgtcgaggcccagatccgcgaagccttcaagaagggtgacctctttgccaaggacgtccacaccgaggcgacgcgtgcccaggaagccgcccgtgaagaccccgagaatgcgccgtccatcttctcccgctacgccgatgccatccgagctcgcatgcaagccaaggcccaacaggccaagagcgccgcccagcgtgatacccaggtccaaaccgtcatgaccctccacgattccctgttccctggaatcgagcttcccggcgctgtatccaccaaggccaccgagtacgccgacctggctgccaagggcgcgcgctgggagtcccccatcttcagcatcggaagcgcagccgagtccagaggcatcccatccggcgggcccatcaccaggaagactgcccgccctgctagcagcagcggtggaaatgccgccgctacttcgaacgctggcaacgtcactaacggcaacagggtctccggatcccagccccgtggcggcttctccgatgaggttgataaggctttcgtcaatggcaagcctcataccttgggtgattccttcaagcatggcgctgatggtgtcactaatactaccgtgactaacggagctaacaattttgcaaccgctgtctaaactgtgtggccaaaatcggtatgaatttgcgtaatgttattgtctttgtttcttgacctttttttttccctgctatgatttccccttgtgcactacggatgttttattatttgtactagtagtatgagttaatggtagcctaatacatgatgccatcgttgcctgcgttctccagagtaacctcgagctttgaccaaagctaactcagtagaaacataagtacccagagtcgtggaaggtaaaataagcttaaaagtcattcatcgtcgtctataaaagaagtaaactgaactccactatataagaagcccggggaaggtaagaaaatcccacacattcatatcaaatcacaaatcaaatatctacgtgcttaccgtctacatctgatcaaagtacttctgccaccccaactcgcgcaacttggtacccttcaactccatgttctcggcacgggcagcctcggcatacgcctcgaccttgcgctgaatagccgggtcgaaagagccaagcacacgcgcggcgaggagggcagcgttgatgctgttgttgatgccgacagtggcgacggggacgcctattatgaaatgttagatatagatcgggtcaaagtaaatgggtgtaaaaggagagtaaagtgggaaataacgtacctcgaggcatctgcacaatgctgtacagactgtcgacaccgtcgagtgagctccccttaaccggcacgccgatgacagggagggcagtgtgagcagctgccataccgggaaggtgggcagcaccaccggcggctgcgatgatcaccttgatgccgcgcgaggcagcctggcccgcatactcggccatgtaatcgggcgtgcggtgagcagaggtaatctcaacctcaggctcgatgccgaagtaatcacgcagcagcttgaggcctgggacgagggtcttcaggtcgctgtcggagcccatgatgacggcgacagaggggacgggcttggagggaccggagggggcagccttggttttgatatcggagcgctgggcgcgcatggtatcgacgacgtcgatgaggggctggatcaaggtctcggcttcgtgcatagtcgcggcggtgacggtgacgtggcccattttgcggccaggccttgcggcgcccttgctgtagaggtggatgctggcgttggggatggagagggccgcttcggtggccttgaggtgggagtcgggagttgcgccgccgatgatgttgagcatgatggagggctggcgaagctcaaggctcttgggcgggatgggcaggtcgaggatcgcgcggatgtggctgtcgaattgggatagcgcgcagccttcgattgtccagtgcccggagttgtggattcggcttgcaagctcgcagagcatgaggctgttgtcttctaggaggaacatctccacgccgaaggcgcctttgccttcgaaggcagagacggctttacgagcgagagcttgcgcttgctggttgatggcttcggggacgttgcgggctggcgcatacaccagcttgcatattgagtcctcttggacggtctcgacggtggggtaagagaggacgtcgtccttagtcttgataaccatgacggcgagttcctgtacaaattattagacatgcatggcgtggtattcaactgctactaaccatcttgaagtaagcccatttttccgagtagagcgggcggtccttgagagcctctagggcctcgggaatatcttctttggaattgacacggaagtttccttgatactgtcaacaaaatgtatacccttcggcatcacatatgactcaccacgtccgtcatatgccatagtcttcgacttcaacatcatcgggtagcccaattgctctccaatctgagccaattcctcgggtgtgttgtccaccagctcccggtggtcggccatagggataccatatttgcggaggtgctccttctggttgaacttgttctggattgtccggatagcctgccagctgggttccacccgcaccttcgatgcaacctcctcgagagcgtaggtgtcgacgtgctcaatctcagcagtgatgacatcgcaagtctcagccagtttacgcacggcatcaggctccttaaaggagccggtcacatggccgtcgtgcgaactgatctgcttggcaggagagttatcgacgtccaggatattgacctgaatgttcaatcggttggccgactcgacgagcatgcggcccagttggccgccgccaaggattccgaccttaggcgagttccacatgatgtcggatcgaaggaataaatgagtcaattgatcgagatatgtaaaagagatcgacggtgcccctccactccgaaaattcgtggagagtcacgtgtcgctatcgataagctcaggccaatcaccgattcgactgccgcgccttgtcgcagctccgactctctgtttccccatgcacagctactgaacaatgtctctaggtaggttgacccatcacggtcgcatgatcagtctcagttgcaataggccttgctgatatcaagattacagacgaggaagctctccaaacagccgccaatggcggccccatggatttgtacgtgaagctggcatgtcaagatcccaaaacgctgagactaacgcgctgatatagagcaagatggaacggcatggctggtccattgattgagcgactggaatacgtacgctatacttcgatattcctgaccgaattatctaaccagtagctccagatcgtatacaatgtgtttcccatgcctcaagcgcgctccgaacccatcggccagcaattatttcccaaccattcttcccaggcgaaccccattctacccgaaaatagcaataaggaaaacacatcccccgccgatatccaaacttcgccccaagcgcgaactgtctctcccccacagcccgcgagcgcgggtggccagcttccacctccgcttgcatttcttctgagcgccatccgttcatcgatcaaaactttcttcgaggagaaacctccacataccatccagagactcgcagagctagtcctctacccgaccaggcactataggacgttacccgcatacctacgtgctgttgatcgcgttgtctcagtgacaagctccgcagatgttttcccatttcaaacgccggctgtcgcgattgctcaaaccaacgggatactgcttcctggcgatagcaccggggtatatataagccctgagtttgcccagggtcttgggagcgatgaatctctgggtggtgcactacttactccgatcccgtggttagtcaacgcctcgttcgaaggcgaggactccaatggcgatgcaggtatactagtcgatggtactttaccctataaccgagccactggttttcttttcactaatgttttcgcataggcactgaagctttacctacacagcctggggaacaggacaccacaaccctactatcagtcgaaaccgacgaaacggttgctaccgcctcaccagagctatctgacgaggttcctcacgcccgtggtccaatgctcctcggcgtggaagacatgggtctacaagacggtaaaggcgtcgaggtgcgtcttaccgcagacggtttggatggtgccaccgatgtccctacaactgttactcctaccatggcaacggaacaacaggaaaaagccgagtcaactggtgacaaggacggtgatatcgtccttacggacactgaaccgaaagaaggggaagaagccaagaatgaagcagagccccaagcaggaaatgcacggtcagaacccactggtgattcatcccaagcgccggacgccgagaagacagcataagcgagttctttttcttaatatggatttttctttttgtctgattttcttggttcatcctggattctagcatcatgagtaacgacctacaagattatatcgattgattttcaattaagggcttttgcaatgcctatgttctctatataatagctcaagcttggtgatagaaatagtaatggggctgcgactaatcctgaagcgtcataaatccaatccgttatcacctccatccttaggacacagacagttcataatatgaaatggtgctagcaaaaaggggaatcttatcttccagaaagagaaaaaccttagtgatttatactaactatctgagacatcaaatcggtctcaattagggcaagcacgctcatccgtacctgacatgatcaagacaatatcctacctcgtggattttcctgaggtcttcttattcagcactcgctaaagacccctcagtcatgtatatatagctataagatcagatgcattatcgggttgattctctcacgtatcgtctgccagaaaaacttgtctcctgtgaaaccttaaaacaccataattcacctgcaacgttaacttgaaaatccaacagcaattttactcgcgagacaaagtcgcatatcaaaagtccacatgacgctgttgtagtatacagccaagcccgaatgcaaacaaaacaaacaaagaactaagcattagccacaaacggccagacaaagaaggcccagaactccgccggcaaggtctgggccctcctggaaccgcaaaaaggtagaaatcatttaatatacgggctccggtctagacctcacagcttatttccgccctgcagttcgtctacccgagccgtgaaaatcgggtcgggaagggcgggtgatatacacccaggtgggattaagtggggatgtatggtgcgtcggtcaattgtatataggatttgggtgggggtccgccttggattcatatatgaaataaagcttacgagactagcactggaacgaagacccgacacagatgagaggaataaaataatatgttttgtaaatatgtacctgacgaaacaatctctccggcggtgaaatggaatgcatgatgagcccacggtggatatcgctgacgcatatattgtataaagtcgcacgcaagtcgccacccaatttaaagaaaaccaacgccaaacctgtaaaggtgggggacaagtgcggtcaatccgcgaagagtgtagcaaaatgtacgatttgaattttgaacctcgttatagacaagtgggaatcgtgagtcaatggacaggcggaaaggtgaagtgtagaaaatagaagaggagatggccgggtttagccaggtcggcccgcttgcacggcaagcatgggttggggttgcgagtacatgcgctgccgttttgacatgttggggttatcggtggcactgcccatttcggacatctgacggcgatgcggggggcgtaatggaggcccggttggcactcctactggtggtgctgggtactggacgccattctggtcaacagcgtaggcgggtggaccggtaacgtatggcccttgaactgccggcatgttcgttggaacagcctgcatattttggaattggttgggcgactgccagttattcatcgatccagcgggcgactggcctggagagctgtcctctttgatcgactggtttgttgaactttgagttgcagctgccatggtcacggcggcggcggaaggtcgtactggctccatccctgggttctgtggcgaaatcttgagatgatccaaatgcctttccagcatatcgagaagacttttgcgggtgaatggtttcggaagtacatcatccattcctaataagggttagtggaagacttgattcaattttgatgttcgtcttaccatgttggaaatagagctggatgtcgtcgcttcggatgttcgaggtcatggcgatgataggagtgcgatcaaattggcgaatgagatggcatgccgacacaccgtccaaattcggcatgataatatccattagaattaaatcgtattttgagccaccctgaattttgttcacagcctccaggccgtcaaactagaggaattagcaacgttgtggtcaataggacagactgatgacataccgcggtatcgataacacacgagaaagagtacaagaatttaccgccaatctgccgacaagtggcatcgtcttcaaccaagaggatctgagggctgcgcacccagccagggtccacattcgtgctttttttccggttgtcggcaaactgccgacgagcatccgtatcgatctcctgcttggcgggcattgggtaaggaacattgttgatatgctcgctgtacatgggatcgatgccgtttgtagcgcccacgggatagaccacttgctccagatcgccggccattttagggtaagcaagtgctgggtttggcggtacagttgccgcgggacggagggaaccatttcgcgcatgcggatccaagttgggagttgacacgacggtcttttgagggtcgttcatcggatcgacgccgttcatattgaattgtaattcggcgttcatgtcattcaggagcttggaggcttgctggaggggcgatgagggttcatcgtcaactgcaccaacctgagaagggctcattgtcgttccgggggcttggaaagtcacggccttgctatctcgacgctggcgcgcatccaccgaaagcaagtaggtcatcacctggtgaatgacattctcgtggttcagaaccgtcttctgcactcgcatcacttcctgtagcatgagctggtgatccaccgtgagctgggcatatcggtctgatagatgttggatctgctgctgttgcgcgacaatctgctggttaagaagatcaatttgttgcgtggggacggattcatcgctcggttgagtttgttttcgtggcgcgggcgcctttcgtcgaatgttgtcgagcgattctttgctgtttgcgcggaactctgggtgcttgaattcccatgcctgttgttatgtgagattcggtccaatcaagcttcaaattgggaggcctacattctgcccgtatggtgactggccattttcttcattgttttgtcgaactttgtggaaatcgtacttattcagttggcggacgaaactggcaaagttgctgtgtttaaagtgcttcggcaggatggtcttggtgaatttctcgcactggaatccgagttagccacgcgtcaaagagaccgaagctggacaaaaacacgggcgcattacctctaatacgacaaaggaatccccttcatcgccccagcgcacgatggacgaataggtcgggtcctccagcatcctgtggaaaagatcagcttaaaagaccaacacggtcgcaggatgcgtccgaagcgaagcaagacttacttatacagcttgcgtacctatccatagtgttagccaagatctctcacagccatagcggacgactaacaaaatcactggagttcccagcgggggcgggattggaagaggtctggccaccgtccatgctgggctagacgggtcgcgaccggtcgaacaggcaggtctggctggtttcgtcccaacgcggataatgtcaggtctaatggcagttcacatccaacagcggaaaacaagtagaggggatagaaagccagacctgtcggagggtgggagaagggaaaaaatgaaataataacgggggtacggtcagttactttagcggtagagccaagtaccaaagttactgtggaggtactgccttggtacattcaatggactgcgatgtttcagaacgcaccgtgggcttcaattgtgtagggctgctctttttgtttgtattatattattctccagcttctatttccccatgcaaggaggttgaatgctcccagcacccaggaaccaacgaggggcagaattccagcaggtcacaccgaacagagagaggtaccagccaggtattgtatacaagttcgtgggaaaaaataaaaacttcaccagatcctattcgctatcaaaagagacatgcagcatgaattatgggctgtcagtgcgcacgagatggaggggaaagcaattcccccaatgatgtctttatatgcgcttgatatcggtgatcagccctgtcatcgtgtcactgtctctcccacttttaagattaagattaaagatattggatatgctgaatcttatgaatatgcgatgctattacgagtctccaccgcagaacaagaactaccccataagactttgctacgtggttatggctaaagccaccgaagcacctcgtactccatagtccatagtctagatgctggtgaacagcccaacgcacgagtttgcaccgtagcacattgtcgtaaaagcgcaaaatcacctccatcacctgagcctcgcgagtcaatcccatcttcacgcttgctgtgttgaattacaacgtcgaagatgactgcatccttcagcaggggtgttatgatccaccgtgtgacggagcaaggatccactgcgtcatggcggaataggatgcgacttcatatcatccgattcgaaggtagctagtccgccttgttcttaaaaagtgcttctgataagtgacagctcatataggaggtacctgcggtatagcctccgcaggtcgcactggtatccacaaggtcagtgtctgtgccgatatcgatgatgtgcattaaataagaagtaaggacgatagctaggatggaaataaacaagcaaaagcatagacatagacatacatacatatcacataggctaaagagagttcctaaaaatacatgcaacggccatgacgaaatccaagctcgacataccgcccttccaaggttgctcttctccgcattattccaaacacttcttcttctcattccttggtccaatatataacttcaatcccatcctaactcaattaatcccaccatgttcgcccgccgtatcgcaaccaacgtccctcgcgttcgcgcgcaagcttccctcttccacagcaccgcgcccgcgttcgtgcaaaagggcgacgccatccctaacctggacgtcctggtcgagaactcccccggtaacaaggtcaatttggccaaggagatcaagaacaaggctgtcatcattggcactccagctgccttcagtatgtgaactctctactgtgatagataggatccggactgacattcttaaggccctgcgtgttcaagcacccacgttcccggcttcatcaaccaccccaagctcaaggaggccggtcaggtttttgtcatctcggtcaatgaccccttcgtgtaagctatacatgtcgaattgcagcgcggaagcgtgggaacatttgttgacgcaactatcatataggaccaaggcttgggctgcttcccttgatccttccggcaagagcggtgtaagttgccattctttgatgtatttttatcctagcaagctgacattgtatttcaacagatccgcttcctgggtgacccctccggcaagttcaacaaggcgctcgacctcctcttcgacagcagcgccatattcggcaacgaccgcagcaagcgctacgttcttctcgtcgagaatggaaaggtcaaggaggctttcgtcgagccggacaacaccggtctccaaggtacgctttcttctatcgagggtgtcgttctatgctaacatcacacagtctccactgccgagaaggtgctcggttaaagccactaaatagagctgcaatctccttgcaaatagtacaagaccaatatagcatgcggcacaaagtttattttaatccttgctgcacggcactttgtagcgcaggattttaatgtacaaatattccatcctttccaacccggccaacgcctgaaccgatgccagaattaaataggcaagcctgtagttgaatcaatcgagcaattaagaatcaatgccgattcgttcctgaacaatcttcggtctggtacaatttcttccatatccctctgggacgagtccatagtccatcatatccccaccctagaccaattactgctgcagagcctgccactgctcgggggtatagcacttgggagtccaagcatgaatagcagcgatctcggccttgagcgcggaattgacgagccggtgtcgcgcaagcatagtcttgctctcgaactgaggtgaaacaatcacagcctggaaagcctgtccacagccacctaaatcaacccaaaaagacagcacgtcagcgggagatcaacggagccaaaaaaaatatttcgacgtcatagcgccgttctcattctaaacttcaatttaaatttcaatttccatacccgatagatcctcaacctcgacatgctgcgcctgcagcgcttcagtcaacttgttcttcagcgagtcggtggtgattccagatgtgtcggccatagcggcgttgaaggcggcgtaggagcgcgcggtgagggaaaatgaagaccgctggatattgtgagggcggagaagatagcggcagcttctgctcaggacggtcaaggaggatgtgcgggagaacatgaagtatatggtcggggaggagaggcgagagaagacgagagagggggataaagtgccaaacccgaggttatcgcgaagtatgggagttgtcgctcaggtgctcttagtattacaaattcagagcctccggtcggctgtggctggtgggttcacgtgtgtggctcattctcgttttctgctcttcttcggtctgcaaccctcgcttggaacatccatctatgaattttcttcgtgctacacgtcgatactctgccatgtctatgctgaaatatacagaatgctcgccattcaccaatgttgtggtgagcgctatgagaaagctgtaattcaccccccgcttaatccccaagctccccgcattgcatggagagcttcatttaacctctgatatgtagatacccagaggcattggcagacaagagcttcgataatacaggatgcaagttgctattattttcaaatatcagttgattggcttctgcaatggactaacacgctcaatgacagtgctgctcgaagctcctttcgacaaatcccggatacagaaaaactcggtcctcctcactattgacctcactaaggccgtagccgatgaagccattaaaaaccaaaactcggttatcgtcgcataccgtaagacgcatccaagctagcatactagcgattggaccccaaacctaacacaacaccaacaacacacagacccaatcatcttccgcggcctgaaatccctcaccctcgccgactcccaacaaagatccctcctccacctagcccaacatggcatcagcgtctactccccccacacagcagtcgacaccgtccccggcggcatggccgactggctctgcgacgtagtaacaggcaacttcgaacctacagccacacctaacgccaacatcgaaaccagcctctcaagcctgtacaccgccccaacctacccagactcacccatccccgccgttcgcgggccctcctcgcgagcgctcccgcacaccatgaccacaatccacccatccccgcccgctacaatcccagaaggcttcgagtcagccggtgccggccgtctggtgacattcgccgagaaacagcccctcactgaactgatcgacaatatcgcgcgtggaatcggcctgccgggcggtatccccatcgccatcccgcagggccagtcggttgatgctatctccgtccgcacagtgggcatgtgtccgggctcgggctcgggcgtgctcctcaagggaggcgaactccctgatctcctgctgacgggtgagatgagccaccatgaggctttggctgtcacggaacgtgggtctgtggttatctcgctttcgcatactaactccgagcgtgggtatctgcgttcagtgatgcagcctaagttgctagtcgaagttaagaagcagtgggaggatgctatctcagaatctatctgggctattcaagctagtaaaaccttgggtgaggctccatcggcggctgcagtccagattcgggagatttatagacgggaggaagttgcggttcatgttagtgatgctgatcgtgatccctatggtattatgattttgcgcggtaactaggcgggctcttctgtttcgacatctaacaatactacaaaacgaaaagcgcaaaatatagtcacaattagagacattactcaacacactagggctagatctatgcagtacgagggagtctggtaatatgtcaagaaagtggttgaaatgagaaggatatcctagtggtagacaatgacagaaacaaaaaaaaaggtgtcttgaggcaagagagaacacaagacaagatgaaggacccaggtcaaacatcgaagaaatgcaggctaccgaggacatgaaaaagaaagcgtaggtctttcagttaagccttccgttcatggcttcaactagcccactattcacggatgtagggagattgtagtgagtatcgagcaacgataggtatagaaatgaaggaaaggaaaaaaatgagaccgggtaagaaccagacgaccgagccccgaatgaccgaatgacagaagaaacagaaagaaaaatgagataaatggtatccgcgtgagtggccttgtcaggaatgaatcaagaaagaagaggtccacgagatagtgactacagatcaatcaggctgccgccaccgcgctgttgctgttgctgacctgcccaggggttgttattggcaggttgctgctggaaaccggtctgctgcggcatgcctgtgaattgttggccgaagaatgggtttcccgtaggagcagcgtgtaggcggtccaagcccaggccggcagaattgacgaatgtgccaggtgttgtgtgctgtgcggggattcgaaggtctccgacatttccgaaggtatcctggccttcgcctgacccaagaagggcgttgagacgagcgtggtgagggttgagtggcgacgtactctttggtggctgtggggcttggaagccggcgatcgggttgggctgagagggttgggcgaacagcgaactttgaccatactgcgagttgttctgcgcaaactgattggttgcacggtcctccgacaaggaattgagtgttggcgggcctgtttttgcatggttgttgaattgtgtttgagtgcgctgagcgaatgggttgtttgatcctgtcggcatgggcttgagggcatcagcgggctgcagttgctgagagtggctgccggcccatgggttattgctccctgccgtctgatagttctcctggggctgttgttgttgttgctgctgctgctgctgctgctgctgctgctgctgggagaagacatccgcaccgtaagggttattcgggttaaatgcggtgtgctgaggttggagagtggcctgcggttgtaaaagattgttctgttgctggccgtaagggttctgatcaaaggccgagggctgcgtctgatagccattggcgtaagggttattcatgccggtgggctgattctggaatcctgtcggctgcgcatactggttgttcaggtagccagttgacagaggctgctgcgcattgatcgggttgccgaaccagtccacagcaccttgctgttggtagccctggttgtagccggttggctggacttgagctggggctggggtgtcgtcgaagagagattgcgcgttgctctcctccaattcgcgctttcggaggtcctcctcttccctgctgagcttgatggccttggcaagagcctcgtcgtcctgacccgccattgtctccttagcccgtcgcctgcgctcatcctcagcttcggccttgctggcttcaatagctaagtggtattcgatgtcggagtcgtcgtccccgttgcgtcggcgtcgctctctgcgcggcggttccacgggggagtttccgtatccttcgtcgagtccgctcacgcgagtcttccagagtttgcgatccgatcgttcactgcgcaaacgatcttcatccagtaccagtgcagttaattcctttgctgccacgcgaactacataacaccaatctgtcaattttgcgacatctctggttttcaaggaccaacttaccgttttggccaacatcccttgcttcctcgtcgacgtatgtgaactcgcgcaaagtcttgataatatagacgtttttccgggcccacgttactaccaactccgagccttcgtggagacaatagtccaagaccttcagcgacttcagcacgtggcgccagttcttgcccttatcgttgagtcgcttgtcaagcatgtccatgatttcgtagaactcgttcgggctattatgcaaatggcattagcgacgttcacacagttggtcgcagacacaaactcacctcccgaaagtcatggcggcgatctcggacatctcggtacccgtagggccccaggggtcattactagtggcttgaaaagtaagttagcgacttggtcacaatgtatgcgaaatgcatgggcgcattgcagcaagcaacccccgcaaaaaagacaggggcaagcgacaacagcggttctgcaacatgcggccagaactcgataatcggcgaaaaatgcgatgtaaagaatgtcataccatttcggaccttgacctgcactgaggaatatccttttgtgacgtttttaacgcttcgtacgactttagacatggtggcggtgatgcgacggtcgcaagtttaaggtggatagaatggatcgtaatcggtcggaaatcgatgcgagcagagtactagattgccaagcacacacagcctctttctcgtgtcgcggcccaagatggttgttaagcgtgttactcctctgaaagggacaggttggtctatcggtccaaaggggtcaggggtttgagctttgaagctaaaagaaagattggcaaacaatagtggatcgtcaactgatgaaagatgtaaagtgaaagagaggagaggggatggctcgaacggggggaatcagagggcttggcagtgacgaagcagtttggaccaaacttatactgccattgtttaagatctacacttggaatttcaggcttgaaggtttcttagttcatttatcatcataagaagccctggaatataagaaaaataagttccaataccacttgaacggtctaacatgtatagtgtatgtataactacgtcgccctcgtggccggaggtccggtctaatcgccgtcatcttactttttctcctttttcccctatatatagcccagaataagcaattatttatctgacctctacatattgatcttgcttaacatattctatcggattatgccaattttggctccaaagctatgtagatataaaaaaaatggcatgtttcccgccacatgtggcggtctgtaggcgagaaactggtcaggcaacagtcaagtagaaattacaagatactattggtacaacggtcatatacattttagtagtatgtattgcccattgttgtatattaaagtctcgcacggaagaaccgggctacgtcattgctgttctagaatagtacaacgctccgataggtccacattggaccctgtcatgtgatacataccccggaagaaaccaagtctgtctgtaagagactcaagagagaaaaatctggggatctagggagatctacggtaatagaagaggcaacatatacctggccagcacaagagacctttgtttacgcgcttgagaggtatgacgtcgcgttgtaaccatctgcgaggacctcgtctggaatccatggtatcactccctcatacggattttaagaaatctatcgccccaagacgagaatggatgcattcaggtctccctgtagattcctacattacatccaggaacagcttgtactctagtctaggagttcaactcggctacgctcatgtattccgtgggactcgtcaagtggcaatgagagccacgacttcaggaacgtccacgagaaagcccggttttttgtttgatgcagacctacatggacctcataacaatggtaatgttatgatccctgtggtaggtgaagcagcatatgctacggcacactctgccgacgctgtctcgtgggctacggtgagatggtggtcagagagatggagaggagagaagaagaagagaagaatagaaatggggggaggggctcttttatacacccaacaaaccgtaccttccctgtcatgtcattgtcacatgcccaccttcttgtttacattgtttacacaggaaggagccctgaagccaatgtcgcattatgttaattccttatagtgcaattgaagtcctagaatgctatcctctagctatcccatcagacagagcaccagcaatactctcaataaaccctttcttctgcatcccatcgacccattcactaggtatagtgtcaaacccatagaaagagcctgcaagacctccataaacagcccctgcagtatccgagtcaccacccagattgacaactgccaacgccccatccttccaagtatcatacttgaagaatgcccacagggcacactcaatggtatcaataacccatccactactcgtcatatcacgaggctcctttgatttccagtcgctgatagttccgtatctagatggcgacaagcgctccttcagaccagcatgagtaaatgggaactcagagaccgcttgatagagctgctccttcgtctgacctatacccaatgtatatcagcgggtattcttcaaagaaaacatcaccaagaaaccaaccattcataaccctacacaccaactccgtgtacgcctcacaggcctccacacacgcgagcgaaggatgggtaatccgactatgcgttctagcaatctccctcgccagtcccgaatcccgccagtaaaccaacccaatcgggacgatcctcatcaagctcccgttcccagagaactcatcgtgatccaatttgctattgaccaacgcctgggccacgtcgagttcacctttgtctatgccacgcttcgaccacagcttcagcgaggtgcgggtggagcgtcctacgtcccatgagcggttgattgtgctgaattggcctttggtcagccatgcgacaaagttgtggattgctagcgtgtggttgtattgcatttgggacttgttgaatgagcatgctagggctagtgttagagacccgtcgtccgaataggatcttgtttatgttagctacgaggtatttcctgtagttagatggtatggctgggatgggaactgaccccgctggttgtttccaggatcttaggcatgtgatcggctcgaatgttcctgcggctttgaattggacggggccaccgagggcgtcggctacgcagacaccccagatggcgccttgggcgcgagatttcgatgatagagacatgttgtaataatgtgataatgtgatgttgtgatattatgatgttgttatgtttttcttgcggggtgatttcgtttctaaatactagcagggaagatccttggaaagtcagagtcatcaggacgcactataggtaaaaccgtggcagaacctcaataataacatggaaacttaaatataaagccgtgactcaatatgagtcttgggagatgcgttgtatggagtacggagcctcattctaggtgggcctgactcacctcggatacgaagcggtctatgttgtatattatctgtaatattgggacctgtgaattactatatgcggttagttttgcctctttgagtttagcgccccaatacgctgtcacgtgacctaccttcaatgccgccgacataaagacactgaggtggatctcaagacatgctaccaataactggtgtatttctcgttctgacaaactctgtcggattaaccgtatccgtaaatgtatgcgtccaatcaatggtttcaatcagtctgtatttctgtactggctcagctgacaatttatggagcctgattacataaactaaaacataaacaatgcacattctcaggatcaatagatcctccggtatccttcggtatacttactgacatgcgtgaccacaggtcatgtgggcccgcctgagagttcagtagggttagcagcctgaggccacccgccaagagttcttatgtgccttaagggtttcagtaccttaccacttccctcaacttacccacttctctcttaccagtaccatactacttttttattagttacataaccaccaacattacttgtcatataactaccgctctcatggtgaagtacgcgatgcatgtaagtataaccctatgagatgatatgaaaaggccccagaaaagatggaaatacgatagattgaagatgaaactaacagttattcgcattcagactgcataccgatggtactgcaccctgaaatcgagggagggtatagatctccctcaactaaacgatcccaatgtgagcatactatttatctactaataaaatgaataaaactaatagagaatagacacagggggaaatcgatctattcctcggcgagcgcttttgtcgttatgccaactgcccgaaagatgtgggttttctttgacatttccttcatttctttgttaaagtactagtaaaaaactaatactaatttaccttacagactcctgctacgtctaccaacaatctcaggaagcattatgcagacaagcatactgatatgaaattggcgagttcgggtggtcgtccaactttacaggatgagcatgatgccgttggtatggtattcttctactacttttttactagtattctgacctctaatagagttctacattgcgatccgggatgagtatgacgcgaatgttgctgctatagtacaagtgaagcctgagcttcctcgtaaggcagatggcactgtgagttacttctaatttactagttttgattatatactaatattggaatagcttcaccttaccaatatgcgtaaggtatctaaggagcttggtggtcaggttccttgtgagccgtgtaaggatgcaaatgatcgtcaaggtaagatattatcaagaaatgtatctttttactacttattaactagtattaggttgttgccgtgaagctaatgctgaccggtgtgataattttgagctgtttgtaactagtgctgtagaggaggatgaggaacaggataacgaagagggagacgaaatggaagagggagaggaaatggaagagtgatactactagccttcctttctttactggtgaagaactagtattttcctactttggctgctattggtggagttcctgcgaaaggttgttattatgcttatcctgctttttactagtgtttctctgtataaaaaataaaaaaaacatggcgtttgccataaccctatagtgaaaagtagtataaaactggtaaattgaagatattaaacattattgtatatgaagtaaccctatcgcaaccctatctctagagagtattttccctttcccgtagtactaactgtctctcttgttgtttaagatcctccctcaattttttaacctttttcctctgatcttctaaactctcaatgctattctcatcctggctgttattgccagtgttgactgacgtagtatgccgaagattagatacagcgggtgtgctatcaatagtcagtaattagtatcatactagtaaagagtacatacattgcacgacttgttgaacgaccttgtgagctgcttgctccacggccgcgtttagcctttttggatcctgcccgaggaattgaatgattgcctgaagagttaaactcataaagctctttatcctcaggggccacatcatcatctaggacttggtaacgtttccgtcgcagagattctaattattattagttagatgccagtaaataagtagtaaatatacataccctctcgctgtatactcttactaaaccgtgtctgcatatcatctgtatgataggaatgtctgatatcgaaagcttcacggctatggtattgctgtacgtcggtttcgtcgaggatctttgacctaaatgaatgtaagtaaatggtagaataccagtaaataattaatattcactcacttcgtgactgtaccaaggagcgtatcctgtgtacccatatgataggatttatagtggctttgctctactgcatttgtatgctttcgcgcttcctcgaagaacatagagtctattggcgagcatgcattacaaagcccagctgcaataacatcgatcttcttatgctcagcccaacccttaagctcagggttatgcgctataaatattagtaaaatactagttttttcaaatggaaatatataccgataataaggtcagccaactcctaataattctgtcgacttttacagtccattaagctggctagtcgacttcttccctctatatgtgagagatcttctgggtcccggcttgctggcaccaatttgttaattgtacgtatgaagtgtatcttacagaagataagaacattcatagtatgccatctccaaccaagatcccggttattggttttctggtcagtctcctggagcatttttccaagccctaatactagtaagttactgtaataatagtagtaaaaggtataatacttacctgtcatttgttttgggcacatatcagtgataatagaccttattccactaccatgtagatagtggaacttgatcttcttacctatacagcgctcgacgagattaaagacatttccaaatataaaatgatacgcttttgtagtctcctgatctgtgaaaactcggaatagcgtcataactagaagatattagctttggatactgatataatagtagtaaaacaaactttttccatgctttgggacaaatgttgcgaagataacctcgttaaaaacgcctttcactcgcttatatgacatatcaacttcgaatgaatgtaatgaagcaaggatctcgagctgttcattaagggcacaaaatataaaggcacctttttcattatacacaatctcgcgtacatagagctaaaggataattagcatagtagtaataatatactagtaaaacgcacctttatagccggatttttctccatctcgaagtaaacacctactaaatgtctacccattggatagtcaattgctctcctttttgtaaggaccacagaaaatcgctctttatttgcaaagctctggtatagttcagacagggtttgagcgccgtatctggcggcgaggtctcgaaccccatcactccgaagaaacgcgcctatagatactaattagtatctaataaaatagtattataatactagtaaggttacttactaagtgtaagatccgatgtttgtccccgagataagagattccaaagctcttctataaggtcgtatggtggcttactcggtggcgggggcgggtggttatgtatccctgcagagtaaaagatagcatatggatgcttctctatatcctttggcacaaatgtacggaatttaactgtgcattgtgggaattgtctctggatcgcaccgcgtccgcctaggtgcacaacatctataaaactagttagtcaataataatatactagtaatatgaattcataccgcaaaattgggctcgtgagctagtttggtagattgcagtgtatacttctgtggtaacttccctctgttccttttgaagaagactaatcagaagccctatatctagcctgttccgctttgtatataatgttgtaaagtaatgattcgtgtggttactagctgagccgttagaacaacgaacgaatggcaattcctctcctactacattctagttattagaggctatatattagtaaagatatagtaaaaagaataagaacgaatttacttacctggtggttgaattttccgtagaccatttcgcaggtagcgtctgcttttttacaagcttttctctccaaaaatttctgtcgaagagcatcgtagaaactaaatagttgttagctactaataaaatattagtaaaataggtcgcatacgctaccgcttcacgttagggttgcgaatattggtatgactgtcgagcatccctctttatagagaacatacgccctacaagctcttcattaacctctgtatgggagaggttacggagatagtcgttaagatgaacacagtgcttcatgccggaatagtaagatgctgtcttcgtgacttggcaaccaaggaaggagcagtaaatatcactttttccgccatcacgcctactagcgtactggacctagtaaaatagttaataactagtataatatcgatgattatataacaacttactagattaagtgcatttttcttctcttatgaagagagatgtcggagattaaccacatatgcatagcctttcggatgagtacgcggatattctggaaggagaggtacatattcaatctctgtagtagatattgcgtcgtgggtagcttctgttaggggagttggttcatcttccgttccctatttgaaaaatattagtaacaaaccagtaggaaactagtaaatttcttcaaaaacatacctcgtattcgttgcgctcatgcaggatccgatcatcggatgcattgtaaagctcgacatctgcctctgcaggctcgtctggttcaggaataggctcggcctttataagctcttcaagcttatgatagcggtgtttccaccaggtagattgataatgcgccatggtaactactagtaaacgaattggaacaatggtttgtaagtagttatacgtgcatatccaaagatatatatattcgatgtagagttatttatcagtaattaggtagtaaacaactagtaaataactagtatacaagaatgtatcccttgtaaacataccacatatttcataccaaaacgggatgatctaatcaaagataccgtacatttccagaccaaacagcatttacataagcctaaactaggggtatcgacgtgagcattgaccgcctgaccaacgtgaggtctcaggcgggcccacacgacctgatctctcctgacatgctccgacaaactcttactgccttaggcataaaatcccaaaaaggcttagtaccactaaggtcgcaccccacaatattttaactggaccgaaccactttccctttctctatcatacttctatcctcagtgatagattaccatctactttctacttcatcatggctgagcagcttgctgagcagattgctgctgatgatcaccacatcttgtctgaattcgaagacccagaacgaaaagccctcattgcgcgatttgttgagagtgatcccacgagattgagtgaggtaccactacgtaactatctcgctttgtggttctcagatatccaggttcttcgcgggttggtgtctccccataataccaacgaggcttttgagcgcttgggtgtcttcaaggctaccgtgaagtcaatgaacatctacgatgtagctgggacttgtaagtacccccagaaaacgtgcaccatgacaccaaactaaccggaactgcttcatataggggctggaaaaacacaggctaacaagactggcgacaaatctcacatcagctccgtctattcatcttcttccgctgctacgcccgcttctcctcctctagcgacggttcgttccaacgtgctctcaacgcacggaaccactgggagctcaacgccaagggtcccgatatttcggccccgtggctcggtctccccagctggtactttgccgcagcgcgaggcagaccctaggtttaaagtatgtttttcaaggagatcaaagaggaaacaaaactgatctcatcgatttttagagcttagaacgggataataaacaatgtgtgttaaccaagcgtggccagcctaccatacaaacagcacacattgtacccaacaagctgaatcaaacaaccaaccgtcaccttaccaagcaggattgttgggcgtggcttgatgcattctggggtaaagaccgtgttgatcaatggaaggcacagctgctgacaggggatgtgatcggaactgagcgagtgtcgaatttgatcacccttgaaatgcaaacccatgaatattgggaccgcgcctcgatcgcattccgtcctgtgtgggttaatgctacaaatacagagatgcatatcgcattccactggcttccgtttgtcaaagatggaccattggcaattcacatcaagcagaccgagcttgtaccgacccaggagcacatctttagcgacccatactataaacctcgtatgggccctgggatgaataacatgcttttccatacggagacactcaagccgatcgtctctggctatgttttcaagatgtccaccaccaacgcaaaggagcggccactgccgtcgatggaactactgcaactgaagtggaacttgtcccgcatcgctgcgatgcagggggctgccgaggacgaagacagcgattacgagtccgacggaggctctgttgccgttcccgcaggtcctagaacgccagttagaggacggcgcatgtctgatgagaataggccacccttccgttcctctatccaatcattgtctccatcaaagttgcagaatctgtcgttggaggatgacaacacatccagctacctcgttgagtaacgagttcctttttcttgctgttgtatctttgacgatgccacgactcctgaatagggctgacttggtgagagggttcggcttcttctgttccttttaacaatcatactatttttaccattttagacccgaaattcattcaaggtctatagaagggcatcttcatattattacgtgtcgaattgttttacaccacagcttaccacccctaagccgatggccaatcagagagaacgaaccaaaccatcgaaataacaattcgacattggtacgcacaacaaactctccaagccgacccagacgacgagaaaccgaccagcaattaggccaaagccctaccattcttacaagccacgcttaactcttccgccaatacctacctatccctcaaaatcttctctttcctcttcatacaacttcctttatttaaacaaaacacactgcaacatgcctactaaacgcaaaaactcactggccgacgacgataccaggccagtcagcaaaaggacgaagccgggcttaagggctcacgctaaacagctaatggacctcatgactgaaactgatatggcttacacaaccgcggacgaagacaagtatacccaggtgatagaatggtcgcagagagaagccgataaaagactcgacgccgacgccgactatactgaacgcgcaatatagagcccaggcgaagaacccccgactaactttggcaaagtcctgaccgcggctgagatggcagaagcaccactttgtatccaaaacgagatcgacaaaaacggcgaatgggttccgccaccacgcggtgtgaagctgagtgacgaaggtgtctatctggccgtcaaaaacatgtctgctgtagagcgcggagaaagattcccagtcgacttcgacaaaaatggacacgtccgagctacatgtatcccagaagaccctgcaccactcggttgggcacacgacctacctatgataatggtggcacaaggaataatcccactcgttggacaactgcatgccagaaagctgggcaacctcaccttgaaaaccgacgccaatatcaaaaactccccggctttcacggtcggcccagtggtcgcatcgaaatccgttgttgaaatgagcagatcgatccagcgccaatatgtgacccacaagcccgaccgggggtacaaaatggagtacaacttggataccgcagttgacgtggtctccaatgaccaccaggacatggcaatcctcctaggtgactgtcacactggcgcccaaagccgtctaccttccagccgacctttcaagttataaaactctatcaccgcacagagaacgttacatttgttctgagggtcgcgtaggtagaagagtttaatgtcgcagtagcagaccgagtccagaagctctgttacgggtatgtgcttcggaagatcactctgaaaagtgggattttgtttacacttgctcagagaggagtcgttaggtagggaggtattctgtggaagtaagataccgggtcgggtcctagtaatagctgacctgagttggatggtagtaaattggacatttatactcctgtgataaaaaaaccgcgaatatacccaatgataccgatagatcacacaaaagacatctatatctagagtattcttatctttcgttcgtctagaaattttgcgcttagccgggaatttgctattaagaaactatgctctacttagctcaatcccctttagaatagaaagagcaactgtacgcgttgtatctgcttataaatatcgttactaacactacggcgggcgaatagcttaaagtattgataaaggcggcgccagtattcgtcgtatgattgaagtgctttctttcgcgatgtcttaaacatccagtcaaaaaagttcacataaatcgcttggtcttccagcagaagatagtccacgtagttatggttcgattgaatgtaatatctattccggtattagtgcccagccctaaggctttcatttcatcaagattaaacccacttccgccagtaccgttcgaccacggcgattcctatcagtgttcttggcttgaagtttggaggaagccatccgagactgcggaaatgctgcaatctggcttacgtttcctcgcaaaggattggatcggtccagaactggtgatcaacttgagctggaggggcggatacagtcgccatagggagaattaagagacaaaggtcaaggtttcgattctatgataggagtcttgagaattaggtgtatagaggtcgatcgaggcagcggaggtgggatgggaaggttgttgaaagagccaccggggggagggcaaacgaagtatcttatagcagctcgaccaggctgggcaaaaatgaaggcggcctggatttgtatgcagaggggagccattttcggcgtctttttggtcgccagtagaaacagtggggggcttacagctgatcgaatgttagaatgggaccgctaatttagcgtgaaggaaaatatattaatccgtgttaatccgcgtttcgaccatctatctgctcagaggggtcttagcgaatgtcgagatctctctttatactaggatgtcttcatagcttataatagacgttcataaagaccccatgatcattatttacagtattatctttaccactaaatcctatcttcttctgtactagggtattataacccctaaaagaatcccgacattcgctgatgtctgacattcgccgagctctcggaattcggattaatacatgttcctctgggccaagaggcgctaaaaattagcggtcccattctaacattcgaccagctgtcggtcgcaagggactaccactaaatcctatcttcttctgtactagggtattataacccctaaaagaatcccgacattcgctgatatctgacattcgccgagctctcggaattcggattaatacatgttcctctgggccaagaggcgctaaaaattagcggtcccattctaacattcgaccagctgtcggtcgcagcgggcggtcaggcggcgactcgccgtctaagttaccggtggaaaggcggccgtttctggcaccagaggcggtcattttcggcgtcgttttcacaggtctttatattctagatgtaaatgaacaaggcagtgcacccatgcccagatattaactgcacatctaattatctttgcgtcattggcaggccaaacaatcatccggaccacaaatgtatagatcttttatgctatgcaacataaaaacgggcggtgaagcccagttccgaatgaaaattaggggtttgggagtatatatcagagtgacatgggataaattgggtatggttttatgaaaatcacataaaaccgaattccaatccgattattgccagcgatagagagtctgtggccagaatgatgttcccagatcgacgcttctgctaacaagaaaaacataaccaatttgcttgtgcttttattcttatctccaagtccattatttctccatgcttaggtacttcgcctcggcgcccttgatgcacgcaatgttggcaccgagcttgttgatcgtctcaatgtactcatcataggggtccgagtcgaagacaataccaccaccagcctggaggtacgccacgccgttcttgaccatcatagtgcgcagcgcaatacatgtgtccatcgcaccgggcatctcggcggagccatcttcgttcgcgctgttatatccaaagtatccaacggcaccagcgtagacgccgcgcttttcaccctccagctcggcgatgagctgcatggcgcgcaccttgggtgcgccggagactgtaccagcagggaagatagaccggaatgcatcgaatcgggtcataccgggtcgcaatacccccgaaacttgagagaccaggtgctggacgtgtgagaacttctccacgaccatcagtcggtcgacctgtgttgttgtggggtcgcagacccggttcacgtcgttgcgggctagatcgaccagcatgacgtgctcggcacggtccttgagactgctgcggagctcctcggagagggcggcatcctcctccggggtcttgccgcgcttcactgtacctgcgatggggtggctgatgatacgcccccgctcttcctttaccaggagctcggggctggctccgacaagctggaagtcttgacagtcaatgtagaacaaataaggggaagggttgacagtgcgaaggtggcggaagaggttgaatgggtggagagaggtgggccgtgatagccgctgtgacgggacggtctggaagatatcgcccttggcgatgtgctgcttcaatcggttgacgtgaccttcatatccctcctgtccgatgttggatgtatactcctgattcggaatgatcgggccctggggcggaagtggtgtgcggtcctggagtagcttctcaattgtcttctggatgatggactggcccttgagatatgcggcctcgatatcggcatccgccgagggaatgggaacgtaggtgataactttgacgacttggaagaaatgatcgaatgcaatgatggtgtcgtaaagcataaagaacgattccggcactccgaggacatccttgagcggccgcgccgtcttgggctcaaagtatctaacacagtcgtatccaacatatccgatcgctccggcggtcaacggcggaaggaccaacccaggtactgtcgcgacgcggaactgagaaagctcatcctcgaggtatgggaggggatctgctgctgggccatggccctcgccggtcttgatgacctttctggggtctgtatgggaggaagtggtaagcgacggaatcggaccaaagactcccgatatcacccacctgcgccaacaaaactatatcgtccaatggtctctgtggtagcagcactttcaaacaagaatgacaaccgcgagctatcgctgcgagtcagcgattttgtccagcatcccatgtccccgccttatcgcgaatgttggaaagaaccccatgactcacttctctgcaatcttcaagtatgccaatgtcggggttagaaggtcggcagcaatcgaagccgtgacaggaagtaggttgggagggtactcggagttcctcgactttgagataacttctcgcgccgtctcgagggacggaatggtggcgatctgactcattggtcaatgagcggaaacaaaatctcgggggtgtcgaacagtggagaaatccagtggcaagacggacgtgtacttacagcagttgccatgttgttataagtggctgatatcgacgatgctagtcaagagaaaggattgaatgggcggtgggaaaatgattcactgtgggtgggtacatgtatgtattgacggccgccgcgtgcaggaatgcgccccggcctgcatgtatcggattcgacctcggaggtttaacaagataagcaatggtgatataaattttaggcttcttatgtatgagttgaaaatcaaatctcgcgcgaccttgaaaggcttacacgtctcacaagtgtgccggcgtttggttatatgcagccaaaagcggactagcgtcgaggggtacatatcgattatcgataaaggcctagcgacatcgggactgtaggatgtacctatattgtaaatacaaacacttcattggagaatcggggtatttccttgattatcagacactaacagtgagttttagaaatcacagagcccacccgagatgggccatgggaaaaaaggcaaaagaaagagtccaccatcgccggtccatgtcattcgccgtgtccacccaaaccggtcccaagcaatgcatgccattatgcattttctaaagaaaaatgtatgttcacagaaggcaaaaagtaaaaaaagaaaatcgggaaaactatgaagggtgatatgtcttcgagggaaagagaaggcttttcgagcgggaatgtcggattagttcaagcagggcatgagtcgtgagttttacgtggctgtttcaaacccactctgtcatcgctgtaaattgatgattgccatcttcgagagtccgtcagcatggggagaattgatacaggtaaactagaccagggagcttacctgtttgtcgaagccataggcaagtcgttttccatctgcatcccaggaaagggcccgatgggggtctgattttgaatagccattctgttcatggtgtccattgtgtccattggtcatgcggtcggcttcctctttcttcacctcggggctagttgcggtccaggtagacataagattaccgccagtctgtttagtgttccagataaagagcccgtccttgctagcagcaccgagggcatatccatcgggggagaaagatccggtaacagcggggtttgagtccaggctcagctgatggatactcgtgtagtcctttgtatcgaggttgacatgccagaccttgaccttaccatccgccgagaaagaagcaaattcaatacgacgggagtcatattgagagctgatgtcaatgccggtgattctatccttgtgggcattggggataagaatgtcgtgggtaggtatccaaattgaagcactcagtccagaagccacgatagcaaccgaatgagactcggtttggacacaacgaataaattcccaagtcgcgttatctttgggagagggaaatgtcttgaccaagcggatgctgttgtccacttcgcattgatagactgcaccctcacctgaagcgaatgccagattgcgtccacaccatgcgagatcataaatatggttctcaattatttgaggttgcgggaaaacatctggtcggcggctgtcgtcccaaagcgcgagttccgatacgttatgatttgaggctacaacgatcagttgtgagctacccgctgcccagtgcaagcccgtgatcagccggggtacttcgggtagtaaatccacggcgtctccattgacgttgtacatggtgatagtgcccctgtcatcagtgcaagtcgcgacggccaatttatcaccaatggcatcccatgctacggtcgagacacttgtgtcacccctcttgagctcgaggattttcttctgcaccggttccgacgacattgacaacttccacaagctgcaaaagaggtcaccagctcccactaccacagtgggatcccgagggcgccaaacgacgtgggtcacgtgatggtccaaattcagcaaggcggtgtccggggtcaaatcgatgggcttggcgggggcgatctggatggaagagctctcgccgttttgcagagtgggcggtagttcgggaatctcctcggccatgctgacatcaccatcctcatccatatgatcgggggtatttggctgactttcagttcgcgccttgtcctccatggattcatcgctatcagtttcgtcctttcgggtgtcctttccggactcggcatggccgttcaccgggcggtcgcgcgcaagttgacccggcgaaactgggtctgtgccgaccgcctcatcgcgactttccgccgatccagttttagttccaatttcaaagggctctggtccgaaaaaaaaatcagacggtgaaaggcttttgtgattgccctcctgtgcatcgccattagtttgggtttcaattgaggaaaccagaaaaaagtaaattattttttccgtttggcgcgtaaggaccgttcaaattgaaacacataccttgtccaaggaggattccatttcgtgatattgcaggcccttctggaccagcgataccagcgcatgggttttaatgtaaggcgcaaacgggagagtctgcggatccgggaaccacgcgcgctgcaaagacacggcggcatcgccatggcctacgtcgagttagaggtcaattggacgggcaaagggggcaatgtgaccaaccggcttcttggaggtacctcgaaggatattagcgctgcaggagatgcatgggttatattgcacttacctccatattaaatagttgacgtgatgcgacgtgaggtcaggttgtgccatgattacatgtgcgactagctaagggccgcggacatgccagagagggaagagctgttttgccgatgaaaatcaaagtggaggcttcgatgcgcgagcttcaggaacacggaacacgaggccggaagggggtgggaacttccggataaacagaaaatgggctttgcttgtattttccgcaaagaatttgagacgtctgagtcttgaagatcgaaaagaaagccaagacaagggagaaattggagtttcggggagggggggtggggaatgaaactgaaagagtggagggaagaagaagtggaattgaggatcaaaaagaatagaggctattctgtaatctcctagaaatagaaaccgagtattcaaatcgagacgaaagagtgagagggagaggaaagtgaagatctgagattaaaggatccagaatgtttggcagaagtccatttaacacacactagccactttggatcctccctgtggcgtcgactctccacactttttttcgaacttctccttctctccagtcgtttttctattaaggtatatgacattgggtatctgcatgatatttaaacttgatcaaacacctctgctattccaacccttgaacttctacgacttcaaattactctcccgctaagcccctaaaaatggggttctccacatatcgggggatttcagcacgagcaccctttgcaggtacataggtacttgattgattccctcacttcttggcgttccctttccgatttagtgctcaaccctgccgctttttgctcggcgtcaagtcgtgccttcgacaattggacgaaaacattacccaaactggacactccacaccatggatccacgaagtctcatccatccgtcgtataaggaatctgtatcccccttcacactcatgcattggtcctatcctgctctcttatatatgatgcgctcggtcggaggaaagccgtcttcattaggggcatattcacattcatcggcaaattcatcctacacctcgttcaagctaccccaattgcttgtcggtcgtatcatcatcagtatgggcattggaacggtctttaccatggttccgtatggcactataaaagccaccaaccggggcaagaacgtcgtgatcgatggtatcttcattaccagtggcaattccatgctactggaacaattttggctcttctcatatcgaaggccagtccgtgtcatggatagttttcctagaaatccctgctgctctgtcccttgtcttgatcatttttatatttttcttccctggattacctcgccggctcgttttaattggccagggaaaacaatccgtaaaggaactaacttgaattagattgaaatcgatgtatcgaaaatccgacgcgagatctcatctgtcgatttttctccggaaaccgctcaagttgccgcttccttcgaagatatcttcaccatgcaggatggaagctattctaccgttctgtgctgtgtctcgacttgcaggtttaaactcaagtgaccggagtactttacagccgtctccaagcagaacctgggattttcgggacaattgccccgtatttcggagttcatcgcttcgttcgttgtattcttcgctattgaccatttttatcgacggaggctgttcctattttgtggaaatggcctcacgctttgcatgatatctatgaccatcattcccaacttctctagtaaaaaccacgcggcgtaggtggtcgacgcgtttttcccgttcatctttcatcgaggtacaaggttaatcaatccatagaacccgttgccttatggcataaccttaaacaatatttttggccatttcaacaatatacttaagacatgcattccttaggcaccaacccctccttcaatccccaaaccaccccgcgattcagagaagacatgccatgcgggccgaagtcaaacgtgcattccttcttacaatattcttattacaccttgaggcacgtattcgtcctgccaaacaaacacctcaatcaagatctagggcgagcaccccgtccttttgctgctcagacacaccttacgatgtccagagttcttgggcgagtatcccgagaccctcaaattgttagtgcacgcaggacagtacgtgcactggtcctcaatcaatcgtgcaacggaatgggcagtgtaatagctcagatcggtataagaaccgtgataaggaccaaccctgagattgcacgaactgtaagtgtaaattctccttatgttgccaatgttcgaccgcgactgggacatattctggagaagggaaaggcagctagacttgtacgcaaggttacccgtactgcatttaatgccgtatgtaacacgcttgttgaggctctcctgggcttcttcgggagtttgctgggcgatagtcgtgaagaggtcaatgatgtcggtgtgcgaatctgtcttgcttgtgttgccgtagaataagagggcattggcatatagctctggctcggagcttctgtagcccaatgcgtcttcctcgatactctgaagaacggtcaagtttgtgccctcgatgatgccggtgctgctgtccacatccccggaaatgtggtatctggcccacactgcgtcgccgaatcgtccctcctgtgtggcgttcacgtattcgcttgcccaaggctcgacgatagggaaccctcttgtgtcattttgaaccacctcgtcgatggtgaagtctagaaacagctgttcgacaagctcggtggtgctcagactcagagcaatagcggcccgttggtttagaagcagagttgcgaggaggtaaagcgaacgcatagtgacagggttgaaaaggtatgtgtatattcttttaagatgggatgatcaaacaaagaagaatgaggtttgaagtggggtggaaagaagtaaaccaaattcgggcagttatttgaatgttatttatacatttcctgcctcctcatctaattctgtatagcagcatatttaggtcaaaggtccctagacggctgattgttaggagcagatcagctgaggatggcagtagtgtatacatgtattcaggttacattgcatggcttatgcagtagaccccaatccttcgaacgcaatgctcaccttagaggcagtggcatcagatgtcaattggttgactgatgtacttttttttctgtttctgtctcattccttcaaaatacgaggaggatgccgcaggattccccaaaaatagggaaaactatcatattacataaaaagaaaatataacctgtgagatatcggatggagtaagtgggagagacactaccactataagcttaggctattggacagaagcctcacccccgcatggtagtgttggtcgagttgctaatgtagccatgtaaccatctgggcatattcaaagctaaaaagcgccgaggccatgtttttcgccaaatggtgggcatcatgcccccacaacaaagccgtgccgccctcttgcttactgtaagaaagccttataatgtcgatcatccaaacatatattttaaagaagacaaatgatcatgatcgaccggttaaactgggtcttggcattgcttagcggctttgagccacacaataacagaaccatttggccccagcacgtcgctccaggcttgacgttatgatatcatggggatccaaggcagaagcatttttgcgtccactctgagattgtaataaacgtatcgtgtcttacaaatgtaagaagacaggccttccgtttctcccaacgcgtctggtgactctgatcatcataatccaccccttgaaggtttaactctgtctggtatgccgctattccgcttcatgcatgcgcttcgccccgattgtgggccatgacaagcaacgggaaacgatgattccggactaaggatgacacggcagctttgcatttggagtcgatgacagtgtatgtagatcaagcacctgtgtacagccctttagaagaataattgatggtagaatatgacgagaagaacctggctcgatggtttctttctagaatccaagcagctcaatgagacgttcgttacatgacaattaaaattccaattcatcagctagaagctcagcacgatgttcagcccgggcttgagcccgtagctccttaatatcttgattgccaatgcgggtaaggaggtcaatcacatcacgatgtccatccgaggcactagtacgctcgtagacggacgagagcgcttctgcatagaggtctggatcgcccaccctgtaacccagtgcatcttcctcgatcatctgcagaacggtcttgtttgtgtcctcaattatgccatcatgcacaccaccatcgatatggtagcgtgcccacacagcgtcgccgaatctgcgttcccgtatagcgttcacgtattcgctagcccagggttctacgatcggaaatcccctggtatccttttgaagtacttcttgcacagtgaagtccaggaacagctgttccaccagctcagtctcgctgatactcatggctctctatcgaaaatatgttatttagatagtgttggtatgcaataaacttcggtgcaaatacctgggtattggcgtttctcttcaagccaagactcaaggtcaagtagagctgcagtagatcgatgaaatggaagatggaaatgatcggaaagtgagactgtcgcttccaaggttagtttattgtctgagtcagggcatactaggcagcagctcaggcaacaaacctcggaaggatcatcgaattaatgttacgggcccacagcggggcagggggtcttatgtaatactaaaggtactggcgctaagcctgaatgggattagtcggagataaaatcctacttaatattacataatcacggcaggaagcgaaccttaatggttatagaagtgggtctttcgacatacaacatacctaaattgcctcttacatattatgaatagtattactcggaagtgtgggcgtcatggcctattaggcactatagtgtgagaattgcggctagcagagtacatacctaaagtaatctagcggggattgtgttggtagcccttctcttactgtcagaagaaacaaacatgatggtcttataccaaagtgaatgacagttatgaaataagtcagccggaaataagagaagccattcctattcttatcatcacatggttatatcatcacgttactattcaattaaccgagcccatgtcgtggtttgtcttatttgtgaatagtggcataaaccgaccgccctcaggatacctataagaaggtggccctgcccccagaacttcctcttcttttctttcttcttcagctctctttgcctctggcttagatcaagtgtagtatctgttctattcagtttaatcgctgaatgttctgcattgcagaacgtcatgattattctaatatttggacctcgcgacttggcctctgtgcttgcacacacctcgttgcacagtgtcactgggcttacactacccccgatcgacgcgaactccttttcatcaactgttcggcttgtccgggcgattggagaagatctctgtttaggatctacgttcttggcaagagtgccgattaactcaccgcccttttgaagagtggatctgaaatactgccggtaaatattaaccaatgaaagggttataccccgatggcatacatactatgtactccgtaattcagatcggcagcgcatggtgtcagaatcttagccaggattgtaagcagagatcgtggatggatacttcagttgccgggcagggatacaaggagtttcctaaggtttgatactagcgggttctttgtcaaacagacagggaggaattgactgcaatgtcactttagtatctcaattcatatacaacaataaatgaactattggagtagtgaatcatcagccttttctacacatctaactttaagaaaatagtatagaagccaaagcagagttcattaagaatcagatatttaaaactcaaggcttggagtacaaggtggcaacttgcaagtacatcctttctgagcaactctacgggcgactaagtatggtattgtgtatgtctttttttgatgtcttttttggactcttttatactaccttccgaaagatctttatactgctttttgaaggccttaatcagctatataagtagctctttgtttgtttatagaatgcgacttcttctctcttttattctctctctgtttctcagccacgcatcacttttgatactactattatatggcttttatactcagtccctcgtttaactcccaatacaactatatattgcatacattttcgttgatactgaggcagaacttgccctcccagatgaagggattatcgacctagttcatgagtatatctcggatatcgaactagatcccgacatgagtgcaaactcctcgtcctatggtgaaaccatccttcggcgcaaatcatccccggatatgagccttgttcaactattaaaaccacaaactatgccactctcgaaaaatcggagggcttccattactcgccatattactaggccacgagatcgcccatatcttggaattccgctgtattcgtgcctgcaaattccacactgaagatgaaccttccgatacaccaccgggcattagctgcggtgaggctggcacggcctgggatctgaggtcctttggtggtcgtatttatccagtctgctagcctgacggtagtctatacaatattcggagcttatgtcccaagagcacctcttggaattttgacgcgatgaagatgaatgaaaattggcggaggcgcattggaagcagaagcagtcgttgaaagctccaattgacgcatttgctcgatttgcacttttggaggatgacctttttggaggaccaggtcattctttttgaattgatctatatctacttcggatatggaactcgagagggatggtttcagagaagattaaaaggaatcataccttgcggaggccagaaatcacttggtgcttcagttagaggcttggggaatatgcgtaatgtttcctagcaacatctatggatgctgtaattcaagccgtattgctagttgtaagcaccatgaaggtacatgggtccctcacttccagtatcttttgaccctgcagctaaatcttctaatcgtccacctcaaggcttccgaacttatgcttagacgattttcagattatccattcatctcccagagaattcgcagttaggttttttggtggtaccgtggggctcgtcgacgagtactggaatgaacggggctcgcaggcagcttaggattgggaatacattgaagatttgaagtccagttacattttcaatcgagaatagctcatacaatgaatgctagctgtgatattgctgcttccttggcgacgatgttaagactgtaacatccggcacatgatttacatcctgacaataattgcatgcgttctgtttgaaacaaccaaatctggccttcaacatgtcagccccaaaagtaaactcgtcaaggttttccataacccttgctagaagtagtccgaggcagcacccgacaagtaaaaactacagacactagtattgtaccaccctggtgaccagggatgggctgtcttcctgcttcgtctcaacagtggcagcagcggtaacagcggtaggatcttgtgccttaccgcgagagcaagcgctgcaagaaccagggcagagccaccggtggatcctccttagtacaaatgggcttgtcaatgggacacgagaatgttttattgtaaccggacagcttggggagtagtgcgacggctcatcaaacttgtcgagaaattcagagtcgatgttggctgtgtaaacgtaaagggtatcggccactattccagaatgggctaggacctgtaccttcttaggtttaataaatagtgcacctatccaagattgtgcagaacataccttgaaagaattcgctgtgttccgagccatttgctctgtacttagtgagcacgagtcagccgttctcgaatttgcactcgaggtgatatctgcatccacatgactcgtctgattctcgggtttgatttcggaatctgctccttgtgactcctgctgctgcgcacgccgttgcccctgggctagagcgatcagtatcgccacgatgtatgggtcttcgacgggattttggggttcaagaagtttcagctttttctcccagacacggaaaccgggttcgttgcttctatttcttttgcgaggtggcgtgtaggacacgtgcttctcgcgaagtaactgtattttaccgaacgtgatataggcaaggtttggagctacggagttgttcgtgaagacaccttccgttctgattcttgcaacagcccgacgattaaagtaaaactgcaggttatcagaactagaagcttgttagcagcaccatcaatgccgtgaaatacgggatatgttactctgaatattcaatatcataagtaccaagtatggttttaacagctgccttcttgacatccaaggcgaatctccctgccagatgatttgcactgatcatagcccgacgggatcgccctttcactggctttatctgcacagcatcatctgctgccctatctccatggaaaccaggatcttgcgatgcgggttgtgtttgtgggttttgcggcctcctctccttctggggccggaactggcacgtcaaaagtcgtagttggtttgaggtccatgctatcggccgtacatacaagcgtgtcccacagttatcacgaagaattgcctgaatcgaatctggttggggtaggcccctgactgtcgttggtgggtacatggtaagagactcgctttgggagggatgaggtcgctgcgctggaggactttcaatatcgtttccagcctttcgcttggatccaattattgaagaaggtaagtctgacatttcatcgagataattccctaggaatatgcgaatttggtgcagtggtagtggctgctgttgaatcaatgattttttgacgcgcgacgcgtaactaggtaactgtcaccctgcggaccgtcagccacaagccacagctccaggctccagccctaggctctagccccatccttgtatagtactacaggggtccaacaaacatccattatttacccctcagtaaccccctcacttttacttagcagtggcgtgaaggctcgaatgaccatcaaatttgagaaactaaatgtatattccacatctcgaacgttctttgagaaatgagctgacgcgatatctatcagcatgactaccccgatttataaagctcgaagccgagccgaatttggacgtctgtctaaggagcatgagggcttacggcttatttcgcagctcaagccaaaggaagtgatgcgttctgctagcagatggtcattccgacatttgcttggctttcgactgctcactctcccagaaaagccctttctggagggttttaaaactgatcacaagaatcactgcccagtgtgtaatactgaaagacagagttcccagaacgttgaccattattggacgaaacttctcacctcagattgtccaatcgactttcggaaaagcacggactctgagcttctacgcctaccaggtggttttttttgggtccaactcgcacgagtaacccgctcgcaagtcttcatagagccgcgggtatatcctcagcgcgaacgacgacctctaaaagcagacggttttgttaattctacatccgccattccagggtcctccccttccatgaagctcagttcatccgaatttgaggttgaccttgacgacctcgacgaggatgagcatgacgctcggcgaagtaaacccgaggaagtcaccgttcacttcttgatgtcgtttctgcaattcgctttgaacctctgtctattacaggatgaaggagaccacgaggtacgaccgcgggtcgaacgccttaaagctacgatccacattgctggccatgatattagcgctgaagatgatggtgggatttgcagcatgtaccgggacaccgatggctggaggatgataaagccatacctggccctcattgaggcgaaaagggcgtttaaatatctcgactttgacgagcggacgggaaaacctaagccagtagtgtcaaatgagaccctggctcagtaccttgccgaagcggtgatatcatggcgagcaaaccgaggggaactgggccaagagtaagtctatcattggtttgtggcattggtttgctcttcttttgcaattgttgacatatgcttctatctacagtgtcttcctcctcgcagcgacgaatacttttctacgtgtcattcatttcaaattcggctctcattatggcgaatacatcgatgctacaagaaaggggacacagaagatcctggtcgatgacgaaaacaaagacacgtttgtctacatgaacagcactgaatggtttaatctccagacgtctgggggaagaaagtctgcgctgtgccatattctagcgataataaggtggcatgacggagactaccccatacgtttgcctgtcactcatgactccagtgtccccgaggttgacagtgattttgagactgactacaatggccccgaggttgactatagtgacgaggttatcagcggagatgacggtgatctccccatggaagaccatagcgattaggatatggatatggatagtttctgggagattaagtaaggcagaaggttgcctacgggattgctgtgcactaagggaggcattatgctatgggctcgtgttgcggaattcgaagtcggcctttaggccacgaaagaccctagcgaggtcgaagtaaatgaaatctacttacattctccttagttagttacatgtttttgttttttttttttgactattaattgtgtcccaccaaattgtgattttcgggcattgcgatttcctacctatatacagtctacctcatatggcttctgggcctcttgtatgtctttttaaatgtcttgaccatctcctgagcagccactctaaccatggaagctacatagactatttattggcctttctcccttctcgttctctctctcttacacacaccatcacaatggacatcatcatcgctctgcacacataggacacattctcatagcaagtgggcttattaccatgccgaacgaactggcagtacgagaaatagatcgccaataacacaaccaccatatggacgaagctttaccattcatgcaagctagctcaaactctttcatcaacgccaccacagactaattcacccgctggaccagcgtcgtcaacatcaaattcaccacaaagattttacttttgatatttgagtctttccttctcttttcttcatgttgagtatggaagatgtgaagggagaggagggggagaggagctccagccagtggaacaggatcagcatgctgcaaagtggtcggcagattgatctgcttctgttcttgaactgactacatatactctatccttaccttatcattacattctccttcttatataattagatagcactgactacgagctcaccctctgcaagagtaagtctaccattgggtttgtggcattatattgctcctcttttgcaattgttgacacgtgtctctatctacagtgtcttcctcctcgcagcgacgaatacttttctacgtgtcattcatttcaaattcggctctcattatggcgaatacgtcaatactgaaagcgagggaacacagaagatcctggtcgataacgaaaacaaagacacgtttatctacatacacagcactaaatggtttgatctctatgaatacaccacattgaccctgatggagtttgccgataaacacaaggatatcctcaaggatgtttccaagatcctggggtggctggcaaacgtgagcagcgtgggcaaatccgatatggagcaactgaaggccaaatttgacgacctgaaactctaagcggaacagaatcttccctcgaaggctctgggtgattggaacctggaggaggtcgagagtatctttgagatccagctgctttcatcggagaatgaggagccgggagatgagtgagacttacgacccattctccgagaggagttccaaatcccagccgcctttgacgaattctacgatttcctcagtaagtacccgtactgtggagaataaggactgagaacttcgagcgctaattaactcggagtccccgataagttgcattcaaacagaaaccgcaccctggttcctgtttcacatctactgcgcttttgtagcatgaagctgatatagaagcagaacgaatttggaaagctaagccagctatctaattgtcatagatcacacaccccttctatgaaagctatgtatgttctgttcatacatactactttacactcgtaaacttcaacacagcactgtagtctgcatatttcttccgggaattagggttaatgatgttaaatccattgcagcattctgagctttcttaagattcaagaacgcttagcacctctctctctatctcaccactctttcaggcttctatggccgtccggctcatgccggtacccagctattagcccttgaggcttgtcactccttcaatttaatctagaactgaaaaccaaacagcagagagcaataaaaagataaatagtatgtggtaaataataagaaagatgaggtgatggcatggaatataagctgacattaatcacaggtgacgtggatgtatgtagaagtagaagcgtctcgccaaacaaacatcgggggacttccgccatccgctctccactaaagtctcccacctcaactttccccatctctacggcctgtggcgtcttgcagctccaagcgagcttcaatatgtcgctccgaatcaaccttccccctgctactcgaatctgtctcgtcagccttctcactctttccctactctataacattgccagatggcggcaaattgacaccaccggcggaacaccgaccacatcgcctctcgtcccctacctgacgctcgtcccttcattcttcttctactacccctggacaatcgtcacggccaccttcgtcgagcagaatatatttaccgtcctgttaaatgctgccaccatattctatggcggcaagtacctcgaacgcgcgtggggctcgcgcgagttcagcaagttcatcgcagtcgtcgccgtgatcccctgcattgccatcatcccagtctacctgatctggggcgcagtgggaggctcctcaagcagagcgtatgcaccccccaaacgagcacatcgatcaccaccctataccaaacaaacactaaccatctaaaaaaaaaaacagtctcacccaaatatgcggcggcgtctcaattcaggcctccttcctagtcgccttcaaacagctcgtcccagaacacaccgtgacaatcttcaaaggaatcatcaaaatgcgcgtcaagcatttccccgccctcttcctcctcctaaacagcattagcggcctcgccatcggaacagacaccgccgcagtcctctcctggctcggcatcctcaccagctggacctatctccgcttctacaagcgacagcccgacctaaccggcacatcgaacggcacaggcatcaaaggcgatgccagcgagacattcgcattcgcctgtctattcccagacgtgatgcagccacctgtcgccttcgtcgcagaccagatctacaccctgctagtcaccgctaagcttctgacgccgttctcggcggacgatatcgcctccggtaacgagctggtgctggcgagaggcgaggcgggcttgcccacgctgttgaataatcagcgtggggccaggggcgccggtaagcgcgaggaagcggagcgcagacgggctattgcgctcaaggctttggatcgcaggttgcaggctgccactattgggcgcgtgcagtcgcctggtttgggggagcctagctcgtcgatgccgcgtcctaccacaccgaatccgactgcgccggctgggcagagtatgctgggggaaacgagttacaatcctgatcatgcttgagtgatcgagtgcttccttttttttttctcctttttttctataactctggcgttttgtgatgcactttgggatttggcctattggacatattcgcattcgtggcatagctggtttgtggcttggtttctttctcatactgatagttatactgatagtgtgtgcacttctgatgatgtacatgatttgttcgatttgggggtttgatttctcgctctattcattaggctgatatcttagcgcctggctttttggccttgaattcgatttgttttataccagagagcttgtatgttcttattcgaagaaacaattttactccatgaatctgtacctggaaccattttcaatcaggtatacgctgtattttaattatcctaacccggctattcgctttctgctcctatctccatctcagcttcctcttcgtctagcaacggcacaaaccggaagtccacaaagcacacaggtccattgggaccctttacgccagcaccgatcgatctgcccactggcacattatgatcatcaagctcaaccatgaactgtaagctcaacaccccctgtctatccccacggatgctgaccttattagcgacagacatagctctcgcggccttgcgaattaacgaaaagcgatagctctgttgaatgcgctcgcccatagaggaaggaggagaaacaaggaaagtctctgtgaccgtaggtgcaagcttagctttagttgcgcgagtccgggcagcgccattatcgagcaacaccttacgcatctgagattgtgtggtgccctgaccagcgccaccggcaatctcgttatgctggtcaactgagaattccacagtggattcactgaacgggccgcctgcaccggagagagcaaagtacggttctcgcttggcacaggcggacagttttaggatcgtgggggtggaggagtcgagttcggcaatggcattgtgtagccaggcggagcgcataatgattttcatgatgatagcgtcgcgctggaggggaatgtctgcttcgtcttcgtcgggctcatatgttactagctcgcaggttgttttcacgccagcttcagtgatggtgatgctaagtggggcgccgtgttgggcgtattttagggtgcaggagcggtccatgagcaaggctggggcgttgaatgcgcttgacgaggcggtgccggtttgcgtgatgctagtgtcgcggggtcgattggactcggagagctcgttgataccgaagatctttagggtttcgaggatagcggtgagagaaacaacaaaatgagggtaagcctcattttgcaattcattgtcttcttggggtgttccgttctggttgttaggttcagggtcggtcgatggattgaatgtgtagctggtgaagagtgacttgtcaagaaacgctagtccttgaatgacgcggccttcctccactgagaatcggaggccatccggggtgatttgaacagtggccttgtgtgcgaaaccaatgcaggagagcagcgtgtagagatggtgggcgttgttggagacaccagcgaaaaggggctccattttgtggcgtaggctggtagctcgaacttttcaggcgcaatactggcacagaacaaaggtaattgatccgaagatgcgtgatgactttggatatttagcagtacagaccctcttgaacccaacgcttatggtacatttgaggggacgcgcaataggaaatgtagccggttagacgtagactccggcggcgcaaatcatgaacacagctccaaaactatccgtaatacccaatcagtatatcgtatgcctaaaaatgggacgcagcgcattactaacccagatgccaatgcggccgggatgcccaaggatacgatgccgaggaaagaccgatctgtttggtgtaatgtcagagtcaaattcgttatgatttggaaagtaacttactcaagccaaatagagtggccgtaaccaatgctatcaatattagtcagagattggctatttccaaagctgtgagaaaccagaagcttaccgaggagcagcaagttgaagccgacagagaattggctatccttggcaataagagggatgaatggagttgcagaggctgcctcccagacttcgttcagagacattaggataatagaattgataaatgtaattgagggacgaattgatgcaggtcaaagatatgcgaaagtgatatagatcgactaatgttaatctggcccgaccggcggttagttgttccgaccgataccccatgccattgtcggcgcatggtcacctgggcaggtttgaaggacaaggacattatgattgctgaatcgccaaagagtaagtgaactttcatactttcacattgtattttgtcaaactatttctgacatacgactatggtatcaggttccaagcgcaaagcctctgaggaggcagcttccccggaatctgggcagcagattagcaagaaggcgcgcacagattccccagtgaaagaggtaagaggctccccagggctactatgtaaatcgcttcgcgtacctgttctgacaagtgccccgcacaggaagatggcctccttcaaaagcctccgctccgaattgttccattccctgagaaggtaccctcccatcccacgccaccatatcctatgtctcttcgtggacaatggctgatgatcacagcccgccgttcttgaagaacgccgaggcgacattgagttccgtgtcgtcaacaacgatggttcccacgatagcttcattgtcctcacaggcttgaagtgtattttccagaaacaacttccgaagatgcccaaggactacatcgcacgccttgtctacgatcggtcccatctctcgatggctatcgtaaaacatccactggaagttgttgggtatgtcacaagtgcctgctgtcctttattggttggattaggccactgacaaactacagaggaatcacgtatcgtccgttcaattctcgaaagtttgctgagattgtcttctgcgctatatcttcggaccaacaagtaaagggatacggtgcacacttgatgtcccatctcaaggtagacatgcttatggatctgcaatttctatgcatatatctgacttattgccctataggactacgtgaaagctacatctccaattatgcacttcctcacatacgccgataattatgccattggatacttcaagaaacagggctttaccaaggagatcacactcgataaagcaatctggatgggctacattaaagattacgagggtggcacgctcatgcagtgtactatgctcccgaggattcgatatctagagatgggacgcatgctcaccaaacagaaagagtctgtgcaagccaagattcgcgccttcagtcgctcgcatatcatccatccccctccgaaggaatggaagaacggagtgtacgcgatcgatcctcttagcattcccgcaatcaaagagtccggctggtcgccagacatggatgaaatggctcgccaaccacgccatgggcccaactataaccaattgctccacttgttgaacgatatgcagaatcacagcgcggcttggccgtttactcaacccgtgaaccgcgatgaggttccagactactacgaggtaatcatggagcccatggatctgtcgagcatggaagagaagcatgagaaggacttgtacccgactccacaggacttcatcaaggacgccatgttgatcttcgacaattgccgacgctacaacaatgagactacaccatatgccaagagcgcgaataagcttgagaagttcatgtggcagcagatccggaatattccggagtggtcggttagtatccacagtgaagctgttctcaaagacaattctaactctgatatctagcaccttgccgataatcattgatcctgggacatacattcattgcagcgagggtgtttttctggaacggcgttggggaattgaaatttgataggcaataccctgttgatagattacaacatgcgattctcattcatgaattaatgccagtttatgaatctcttctcaatgttgatcaaatagtctagatcgacgtctagctcaacccatggatggatatgttgatctattttcccaccaatcagatctatagatgctatgcttggtacggtggggctggtatctgtcaagctcgagttgatgtctatagtagagcatagagtagcttggatcatagcagcagagtatagaagaatatacataggtagaaggcaatataaaggcgcttatatgcatgatgatatgtgatgcaataacctaaaacctcaacgttaatttccccctgacagggcttaatctcggattatcgttgttgcggggtctcaacaatgctgatggctggaatagcctcacagacttcacccttacgtcttttgttccgataggacttgtgtttttcaatttttcgttgctttctttttttgctgttgctattgctgggccgacctagttgtgttacaacctcaggggctcgatatccacacaccattcattgtttacgcaccaacgtggagctcaattcgtttcaacccctctcatttcgctctcgattttcaccattcgctttgaatcgcctccgtcttacccccgtatcttttagggtgtgcagagattgctggcccgcttgccgacgcgaccttaatctctcccccttttgctcccccgcctttgctttgaaatttcggtgctggtcctttcatcgttgcctactctaaacacattatcgatatgtctcatcatgatgttgtcgacgcggagtcgcgtaatcggctaccgactctctttgaagttctcagccgccgaactctcgccccggtcgacctcttttcgttctacatttacatgcgcgatcagcagcgttccgtagactatctagacttttggtgagtgtaagctcgcgttggatgaccgtatctgaagttaacgcgacccataggcttgatgtatcacaacacatgctactgtgccgacactatgtccgtgaacttcgccgttccgtcctcgtcgcgacacccgatctggaaagagaaccttctgccatgctagacaatctggagaacctaggtgatattccgctgacagaagctgggccttctcgtctaagacacggattccaagaaaacgaaaagggcagagatgccgaccaacgcctgtctgcttttcttcgctccgaaggccacaccacatcaccctcccgaaacagtccaagatcttccggcgaatcagcgcaccaagcctcttcctatgacggtggccgtgacaccccggattcccggcttgacgactcctcccccgggcacacagtggcccgcaatgacattcgcgccagcgctgagaaaatcttgtacacatatctgcttcccggttccgagcgagagattatgctgccagaatccatggtttccacgattatcaacctggttgaggatgacggccgagatgaccccgaagtgtttgaccctgccaaggactatgtgttccaggccatggagcgtgatgcattcccagggttcttgcaagcaaaggctcttgggaacatggttcctttgagtaccatcttgcgcctcgcttttgctctgattagcttcggcggaggattctggggtgccttctacgttgttctgcggaataagcctcggcatattcgttgctgggtatgttgatgatcatctctaagcactaatgaatctgtctgctaactttatttcaggtcattcttccatttgctgtcgccgcatacttcatcatctcctatcagtacaagatcgaccccatcatggcgttcctgggctacagtgaatacacctttatgaactgggccccaattcgcgagccatatgtccgaaagctgctgaacaagcgcgccgtcgtcactgcgttgatcgcctttttcacagcggcagctttaagcatcttgtttattttcgtccccggtaccatgatgtgagccgtttaccacgtccagtgtccatctaatacaaacttcaaaacaatcaccccgtgaacctcgttcgatcattcgatcattcttacgtctacaattgactcgacttgacctgtccaaggcgttcccgtcgtgtccgagtacagaggttttgcttctatggtgcatattcttgaaaaagactatgtctcggatctgcagcccattttcttcctgggagctatacagaggtgattgtttcctccatccgtcctatcccgcttattagcggtcacgtctacttcctctttgtccatatttactgtctctgctgctttgctgtgattattttctcttctaccaatacccctcaacacttgaaaatgttgtattgtatctatttttcattaatgagcgtcgccattagggccttacgaatgcaatttgctcctttccgggttctatcccaagagatgaaactaaaccataatcaagtcatttcgtatcataaatcctgttggagccgctgccatcttttgtgcgacataaccatgagcaaatgggagcacctccgcacttcaagacttgcgccccagcaccctctttggctgccgactatttcccgcgcgagcaccaggcgcctcatcaatatccatgcgcgagccatgctcaccaccgtcataattgtcaaagtacccatcatcctcatcaatatcgtccgcatccctcttactccctccgaggccagcgccaagccgaccaccgcgccgaccacccctcttcgccatactttgcttcctcttcttagccttctctaatgcctcatcgtgcgcctgggcacgtgcagcacgcttcgcagcatcactcttaacgcgcgcaatctccgcctccagatcggagacaacctcgccgcagcgcgattcccactcgctcaagttggcgatcatcttagggagggactggggtaggacatcgcggagtggggcgacggctgtcacgttcacggatggtgggttggaggctggtgagaggcggcccgctatcaatgaggcgtagatggctcttgttacgagggattcgagctcggattttgtggggctgctgagggcggtcatcagggcgctgtaggtgaggggtttgattgttgttgagagggttaggagtgagagaaggcggagtttgagggtttgttctgtgttcaactcggggaggtttggggttgctggtgcggggtatcggtggttagcttttgttctggtaaatttgagggttcggttctctggggaggtttcatttggatggtttgggacatggtttggtttctgggctttggatgcgtgcaatcttactttgatattcttgccatgtgccccatgcgaagatctctagtagctttagatagcccttaaactcggctggagtgtctggtgaccgtaatgcctggatcgttggcagctcgaggagctctgcgaagacgtaggtttgcgcgtttgaggtggcatttgtgatgagattcgcgataaagcgaggcgaacctgcgctgttggagcgggctaggtggatgaatggttggagagcctctagggctcgtgtgtgggtttgatccattgtgatatggttaaccgaggtgtaggttcaatgagggtatttggggatattggagagtaaccaagaaagaggactgcaatatgggtgggatatacgtggtagctgagttcaagatgggaagcatcaaatgtagtcggagatgcttgtttgcattgagtgcaaacacgtcttatctgattcctctacaactctacggagtatagagccttggagggctgttgctttttgtttttatttttcgtatattcattagttcctacttctattctgttattgcttattctatctcgtatctattatataattgaatgctagcgtggtaatctcagtgcagggcattctgcaagtatagcaaagcgacaatcagacgcagtgtaaccaggttcatctctgtagacatttgaaacaaccacttattttcgtattgcttagtctgtttcagccttccaataacccacgaaatttgatattaattccctcggggatcacttttaatctaattgaaaacccgaccatctatatgtaatcagctgcccacgcggacattccatagcgtggcagagtcggtccacatcaccgaggtcctattcccgagcaaatccactttcttttcctctctccccttgcgcctctggctgattttcaataaaatccgatcgacgtggccttctaggcagactatttctttttaacttctgcagttctctttgtctgctcaacaagggaatgatctgttagtcttgcgccatccgagaccttccgtccctcagcacgttatcaccctccgccatcgcgtcggaggtaatttggtagacaccctccatatgctatagtcgtcgtttctcgccgtgttcgcctcgcgcttcaccgtcgagcttcaccgtcgagatgttatctacaaatccgcacgccggcggggccggtcgacccgcactggccactacaactctcaagatcgacggaatgacttgcggagcttgcacatcagccgtagagggcgcgtttcaaggggtagacggtgcgcacgatgtgtctgtcagtctcatcatgggcagggccactgtacaacatgatccgtcagtgttaccacctgcgaaggtcgcagagatgattgaggaccgcgggttcgatgcgacagtactttcgaccgaggaacaaaggaaccccgactctacttcttcttctccagctatgagactatcggtgaccaccctagcgattgaggggatgacatgcggggcatgtacgtctgctgtggaaagcgggttgaacgatgtcagcggtgtgaactccgtagacgtatcactactttccgagcgcgcagtcgtggaacatgatgcaggcatcatcaccccggagcagatcgcagagctcattgaagatcgaggttttggagcgcgagtgctggatactgctctagtgggctccaaggagccacctgcaccggctggctcggaagagaaatctggacttctagtcaccacgatcgcaatcggcggtatgacatgcggcgcttgcacatctagcgtacagggtgccttgggcagtgtggatggggtaatccagttcaacatcagtcttctggctgaacgagcggttgtcgtgcacgacccaaccatactccctgccagcaaaattccagagcttgttgaagatgctggatttgatgcgtcaatcgtttcatcagaggcgcaggcatcaatttccaaaaagacacagcagataaatttgagcttgcatgggctgcgggacggcgtttctgccactgccttggaggacaatattttacagcattccggtgttcattcagcatcaataaaaatggctacctctcgtatggccatttccttcgacccatccacaatcggaatccggtctattgtggaaataattgaggctgctggttacaacgccttgattgtcgactcagatgataccaacgcacagctacagtcattgtccaaaacaaaggaaatccaagaatggagaagatccttcatcatcgccgcatcttttgcggttcccgtgttccttatcagcatgattcttccgatgtatttgcccggaattgactttggccgctttgcactcgtcccgggcctatatctcggagatgtagtctgtcttgctcttaccattccggtgcaattcggcattggcagacgattctatgtcaccagcttcaagtccctcaagcatcggtccccaaccatggacgttctcgtaatgctgggcacgtccgctgccttcttttacagctgtttcaccatgatcatgtctctttgcagcgcggaccacggtcgtcctagcaccgtgttcgacaccagtacgatgcttatcaccttcattactttgggacggtggctagagaaccgagccaagggccaaacttccgctgctctttccaggctcatgtgtctgaccccgtctatgactactatctacgaagatcccattgcggcagagaaactggctgagcgctggacctccaaacctgtacatggcgcgcctgagcaacccacgttgggtgatgatatgacggtgaatcaaaagtgcattcccaccgagctgattcaagtcggtgatatcgttatcctccatccaggagataaggtgtctgcggacggcgtgatcatccggggcgaaagctatgttgatgaaagtatgatcagtggagaggcactacctatccacaagaagaaaggcagtcaggtcattgctggaaccgtgaacggcacaaactcaattgatttcaaagtcattcgagccggcaaggatacccaattgagccagattgtaaagttggtacaggatgcgcagacgagccgtgctccgattcagcgcatggctgatatcgttgctggttactttgttcccaccatcatcggtcttggtttgataacattctttggttggatgttcctcagtcatgtattagctcatccccctacaatatttgaaatggcaggcagtggtggccgagtcatggtctgcttgaagctgtgcatttcggtcattgtctttgcgtgtccctgtgctttaggtctgagcaccccgaccgcagtcatggttggaaccggcgtcggcgcggaacatggtatactcgtcaagggaggtgccgtgctagaagctgccacaaaagttactcatgttgtctttgataagacgggcaccctgactacaggtcggatgagcgtggctcacacccgaattgaacctcaatgggcgatgaatgactggcgccgtcagctgtggtggcttgttgtcggtctcgcagagacaggaagtgaacatccgatcggccgtgcgatcgtttctgcggccataaccgaatcaggccacgccggagaagatgggttgccagggagcacgggcgacgttgacaactatgttggtaagggtgtctccgccgtcgtcgaacctacatctagtggccagcgtatccggcaccatgtcctccttggtaacgccagatttctccggtcccaagatgtccctgtacccgctgacgcagatcccgactctgcggaacctgtcgaagacccggaagctgacatccccaagccgggtgtcaccggggccggcactacacgcatccacgttgcaattgacaaccgctatgccggaaccatctccctccgggatacagtgaaagagacagccgtggcagcagtagcggccctgcatcgcatgggcatcacaacctccatggtaacaggcgacacgctctcaacagcgatctcaatcgccacagcagtcggcatcccaaccgccacaatacatgcctccgtctccccatccgagaaacgctcaatcgtctccgccctccaagaaaaaggcgagcgcgttgccatggtgggcgacggcatcaacgactcccccgcattggccacagcatccgtcggaatcgccctcgcatccggcacagacgtggccgtcgaggctgctgatattgtcctcatgcgcccggacgatctactctctgtaccagccagtctctccctctcgcgctcggtcttcagacgcatcaagttgaacttaatatgggcttgcatgtacaatgtcatcggccttccattcgccatgggccttttcctgcccttcacaggcttcatgctaccccccatggccgccggtggtgccatggctctttccagtgtgtctgtcgttgttagtagtctgctgttgaaattctggactcgcccatcttggatggaggttgagcgtcttgagaaggaggtccagtccggtgcaatctctgcagctggtgtggcgcctcgtaaggggagctggtggccttctactactattttctctaatagcccgcgctctctacgtcgtcgtgttgggaacgttttctcttcgctttggtctctcgttactggcaaaggacccatgccggctgaccggggtgatgatggttatgttccgctgcagacagttgagtcgcctgtttaattttgccttgtcgaattccccatataaagacttgtcctgtataacggcttacttttgtttgatgcctcatgtatttcgggcctagttttggcgttttgtttttgtttttcctcatttgatacctcctccgttaaggtcatttctgcatttgttccaagatcctcaagatgtaaaaagcccaaagacaaaagtaagggataggtacatcttgcttgtttgcctgttgtttaacgaaaagtaggttctagtatactccgtacgatctgtctcttccaatatcctattgttcgcgtatccagtggtaaggaatataagacatacgcgcacttggcactcctttcaagttataggatggagaaagaggctccattcaatacctgtagagctagctaaaatatgggtaactgtaacgtattgtcaccccaatgaaaaatctcgtcctcgagatctggcttgggtacatagtctcttactccagctatgtgccctgcttgggtacataactagccgcgtagtgccataggagctcggtgaatgaccacatttagggtgagaaaatgcaaagtgctagaaattgcgggggagaaaatagagtcgatgtatggtcgatctttccccacaaaaagatttctccacaacatagggtgcgacttttgacacactgtccaccatcgtcatcggattgtggctctactaggcacgacagatatcaatgatgcaagcgggcctattgaagaagacgggtgatttgtatctgatttctacctgttccactatcttcttacgccccagtttccacgtcgtgagtgttttactattttgcttgctatatgctatttactaaccacatgcgcttaccagcaccaagccaaattcggttgacttgtgaggatcccgcaatcctcgttcaaaaatacgggaaatacctccacagcgattcgacaaaaacatatcgcgtcgtccttgactctcagagactctcagaagtctttggcccttgggaatttgcgtgttgtctcccgagatgatctcctggaacgatatctaaatactatacgcgaacaagcaatcgaagctgagcgcctgaatgaatacttagtgttgttgatatttggccatggctccttggatcatcatgtttctgtaggaaatcatttcctcgaaatgaaagacttgcaacgcattctccaaggaaagtcactggtcaccatctttcctgttactcgggaggttgacttgtcaagccagattacagaaatcaacagatgaatgtgaccggtattacagcagcaggtgaagacacaaagtcttcatcatcgcccttgagtagaagtattgggcgtgtaagcggcagtctggagtcgttcaatgcctagtcgagatgcaagccgacgaagcccaaatgaacactcaaaaccccattgaaatgagggaaacaatgtaccatccgatgtaaatacagctagcagattctgtgtattcattctaattttaattctaatcaactccgtacttaagcttcatctacatctttagactaaacctatttgggactgtctgcctaaggcaacaggttgaccgcattggagtgcaaacagtgcaaacaagtgggcgggatgactccgaggcttttttgtgctcttctttgataacaagatcaccgcgtttcttgtgtgctatttctggagacggtatctgaaaatcccttctgaaatctctcagtttactttcgccaaccttcggtttaacgggttgttgacacatttaacgaaaaactgccctgccgctcttccaccggctattcacgaaaaatagttcttgcgattctctagattgatagagcactcgttgctcacacgcctacaacaatggcccccaaacagaaatctgggcaaaagccaaagcccaatgcggcggaggaagtggaagagaccttccaagctgtggtaggtctagcagttggcaaatgcttgcgtgacttctctatgtgttatatatttactaacctgtgctttgcttaggtgttcgcagataccttcgagacgagattcgagcccttcacccgtgacaagcctcgtgtatgttctacagcaaaccatctatgcccaagacttcgaattaacgaaccaaattattagtgccttttgccactcgcaaataccccgattatcgaatacaccctcgaatttctggccaatgcgggcgtggaggaggtcttcctctacggaggagcgcactcggatcagctggagaaatacatcaagtaggcttgccctaggactctccggtacggatggcagagctaacttatattgccagtgcatcgaaatggagggccctgtcttctccattcaagcaattgacattcctcaagtcgacttctacctctgttggtgacgttatgcgcgacctggatggaaaacacctcatcactggagacttcattgtcgtgagcggcgatgtgatcagcaacctgcccatcgaaggcgcattggctcagcaccgggcgcgtcgagcacttgacaagaatgcgatcatgaccatggttctaagggaggctggcctacagcacaggaccaagtccacctcaatttcgccaatttttgtcattgaccccactaaggaccgctgtctccactacgaggaaatcgaccgccatgcagacgaggagcattcctctcgcttgaacattgacgccgaaattatcctcaaacaccccgaattggacatccgccaagacttgatcgactgcagcatcgatatctgcaccccggacgtactgagcttatggtcggatagtttcgattaccaatccccccggaaacactacctgtatggtgttttgaaggactatgagctgaacggcaagactctgcacacatacattgtcaaggaccactacgctgcgcgcgtgcgcaacctgaaggcctacgacgcgattagcaaggatgttctctcgcgctggacatatcccttgtgcccggatacgaacctactccctggtcacacgttcacccttcgtaaaggcagcatgtaccaagaaacaggggtgaccctggcacgctcttgcgtcattgggcgccgcacagttatcggacaaggcactagtattggggaccgggcagaagtccacaactccgtactcggtcgaaactgtaaaattggccgcaatgttaagctggatggtgcctatatttgggacgatgtcgtgatcggcgataacacagacgtccgtggggcgattatcgctgatggcgtggttctcggtaagaattgtgccgttgcagcgggatcgcttctgtcctatggtgtcaaaatcgcagataacatctgggtggagagtgggaagcgtatcacgaaaactcgaaacgacggcagtgtgggcaagaacgatcccgcagtcgttggcgaaggaggcgagggctatgagtttattcacggcgaggaagaggaagatgaggacgacgacgtgagcgtagcctcatcgggacttggtatgtttttttctagtgtgcttcttcgggtccgcattactaatttatgctatccacagtgtaccgcatgcccaatctctcactttcttccgcctccatttcaacactatcatccgaggtctcaaatacctcctgggcacgatctgagcggagcagtttctccgccgacgaagattccgacaatttccaccacgatgcatcagtcagcttgttcgacagtctacgcgaaggcgtggcagcagacgtggtacagcttgagctggtcactctgcgtatgagcgccaacgcctcggacaaccaggtccgtcgcgctatcgtaacatcgtttatgaagcacatccagcagctcatggagggcggcaagggtgccggtccggcagtcaatgaggtttttacggcatacaaggaggttattgagcgcactctattcgatcgcagcaagggacaaaagaaggaccaggttgatctactgctcgcgctccagcaggatcttattcatcgtaataagggtgatatggtccttctctttactgccaagtctctatatgaacttgaccttatcgaggaggaggcttacggccagtggtggaatgatgagcggtccagtaactccgaagagatgcggactatccgtaaccagacccagcaatttgttgactggcttgccgaggcagaggaggagagtagcgaggaagaatccgaggaagagagtgatgatgagtagataccacatggttttattaaaattccaatatgacattccaaaattccttttacatatgtaattcaaaccctaggatatttttcattagagtcaaatatatcatcttctttgacaggctaccatgagtctttatcacgaaagcggagcctacaataaggctgacaagtggaatgattcatatctgagtcaatgggcgcctgaaagaggcggatatttagacatcagctgaccaaccatggaatctttatttacgaacttctacgaacgtctgattttgtttcagactcaataaaattgtagacattcaaatatcacgaaaatcgtaattccttcgaataccttcgagtaccggttcgagccgccttcgggggcaacagcccggagatcttacgcttccccactcccctctacccgtgcccgtcacaggttttacccagtggcgtctggcccgatctctcacttataacatcccccccccccccccctgtcggcacttttgccgctaccttcaccacgcctcccactacacgaaagagaaaggcggctgaggcgattgcggacgaggcactgccaaaagccgcccacggcttccggaaactcaatacatccgacaggttctcccaccaaagcgagtcaacagcgaccacaacagaaaccacagaaaaagaacgtctcggaaattccgacctaaagaacaagccccctgcgacacccactaccgccagcatggactctgacgatgatttcatgagcgacgtctccagccaggatgatttcttgggtacccagggctctgacgatgagagcttgggtgaaggtacatgcctgatcttgcgttgtttatgttttgtgcgactgtgtctcgagtatagtgactaacagatgtgccctggggagcagacttcgatgatctcgacgccggattctcggacgataaagacctcattaaacataaaaagaagccatacgaagtcgagttcaaggttcttgctcctgcagatatcgatcacgaacagcttggccaggtcaacgaggtttgcgccattctcggactgccgcctgagtcggcggcgattttgttacggttcggccggtggaacaaagaaaagttgatcgagtcttatatggagcatccggagcagacgctggaggaggctggtcttggatcgaactttgaggggaccgcgaagaccgagtgcatcccgggcttcatgtgtgatatctgctgcgaggacggtgatgacctcgagacgtatgccatgcgttgtggtcaccgatattgtgtcggctgctatcggcactacctggcgcagaaaatcaaggaagaaggagaggctagtcgaatccagtgtccaggcgaccgctgtaatcgcatcgtggactctaagtcgctggatctgctcgtgacaaaagagcttcaaggaaggtgcgtgtttatgcaggcaattctagacggaagcaagagttcgctaacacatctctcactacagataccgtgaacttctaactcgaacatacgttgacgacaatgagaacctaaaatggtgtcccgcgccaaactgccaatacgccattgactgtggggtaaagcaacgtgatctccgtcgcatagttcccacagtgcgatgtttctgtaagaatgagttctgcttcggctgttccctcagcgaccaccagcccgctccatgcaccctggtcaagatgtggctacagaaatgtgaagatgactccgagacggccaactggatctcggcaaacaccaaggagtgtaccaaatgtaactcgacgatcgagaagaacggtggctgtaaccacatgacgtgccgcaagtgcaagtacgagttctgctggatgtgtatgggtctgtggtccgagcatggcacgagctggtataactgcaaccgctacgaagaaaagtcaggcgcggatgctcgcagtgctcaagccaaatcacgttcctccctggagcgctatctgcattactataatcgctatgcgaaccatgaacagtctgccaagctcgacaaggacttgtacctgaagaccgagaagaaaatgactagccttcagtcacagtctggtctgtcctggattgaggtgcagttcctggacaccgcgtcgcaggccctgcagcagtgtcgccagaccttgaagtggacctacgcctttgcattttaccttgcgcgcaacaatctgaccgagatatttgaggataaccagaaggatttggaaatggccgttgagagtctcagtgagatgttcgagaaaccagttgccgagttggcaggactcaaggtcgatatcctggataagactacttactgcaacaaccgccgggtgattctattgagtgtcactgctgaaaacttgaagaatggtaaaggaatcttagatatcatctgagtacattgctaacacctgttgctaggagagtggacatttaacattgattggtaattgacaaaccatcttcagctttctctcgccggagactccgggcgagatcttgacgacgtgaacgacatctatttttttacaagttccagcataccttttcctttctccatcatccttgaccattaaaccgttgaaatcatcgcccttgcactgtttcgcaacagcaacggccagatctatccatctccaaggctatcataggcattttttttgtcccgcttcctcgaattggcttgaatagcctgcatgtatcctcatttgatgggggctttttttgggagtgtttttcatcagatttcagcttctctttcctcattgttttgagttcaggcgcagcggtcttttacagaaatgattattctcaggtattatagcagggtgaaattcccccattcaacgcaccttccctttgaccttactaagcgtagtgactgcccacatacgctcctacacaatataaagtgactctatcagtctctaagacagcccagactaatatacaccgcgtccgacctatcccatgacttgaagtgcaaggttttcccgtgagaaacagggggccgtcagcaggaaccaagccaatatagcagaccagatgagtttagttcgcggcttgtaggtccaccgggcctcggcatgccccagtcacaggtcgcgtgttctgctttccctttgtctgccaagttcgttgaaacgagagccaaagttaataatgcaatatgacatataatatcaaccaagcacacccgagtatgtatgtataaagggggtgggttatcgggggttccaatcgaaagaaaatccttctcgaagaccaggaagaagccaaagctccacccaacatgagttaggcgaaatgtggtcaagggcgaagacgggtttgtttagtagccatcttatctgattgattaaatcaggtacctgcggcgtacctgtaccgttggcgctacactgcgaaggtactggtatggtactttacataaaaatttaaggtgctggcaccaggatctgccccctaaactccgtcatcggaagtttcggagattttttactcttccatttatcggtacttacttgtacggggtttgacgctatacaacataggcctttattcttgcccggagctgtacggaatacgagttatgtagttcggccttttcttgtggtcgagttagtcccgaggcatggacgcatggagcagctggaggcccccggagtctggccgccgattctgaataagccatgcatacattctctagggctacggattccctctaagggattgaagtaaggagaataagtaatatagaatgagaataggtagcaaataggctctagcagtcaacagaacagcaataataagggtttttagagtatagaatacctaataattctaataatcaagctgggtggataattttcctagcgccgtttcctggtttttgtgtccaaaacacctaaatttccaattatttccagctattccgttgaaaggaaaaaaaaaaagttcttcttacatttctttgttcatttattctcccatttggttggctttttgttcttgtcgtctcgtgttggcattgtgctgttccttcctcgggatctctaacctaatccctgtttatctcatcttcacttttccattcctccgccctccgccgcagtcaactaccctcccttcctctctgtacgaactcttcatctgctacagctgcgccttgagctagcggaagctccatggcggcttccgatcaaatccccgggcaggaattcgagtatgtcgctcttagatcggttttttttccccaggcaatcgggcatcgggatcgcgggaatgaacgaacacagggacaaaatcatcttattttcgagtgatatgatctgctctggctattgctcgattgtccctgttgagcatcctgcttttttgtttgccctgttgtcgctctggaattcaattgtgtggcctaagctaatgcgatacactctgttctagctatgaagcccttcctcccaactatggcctcagccggaatatgctcgctggtgctttcgccgggatagcagtatgttcacatggctgtcaacggtgtttgaggattttggctgatcggattaaaggaacactcggtcatgtaccctgttgacttgctcaaggtaagcttaatttttggttgaaggtgttaagacttggaaaaggactgagcgctgacttgcaaacatcgctagactcgcatgcaaatcctgacaccttccgctggcggtctctacacgggattgaccaacgcggtctctacaatctatcgagttgagggctggcggacactatggaagggagtctcgagtgtgattgtcggcgcaggtgtgtatatcgcgcgaagtcccgggttaaagattcaatttctgattcgcgatgataggtcccgcacacgctgtctacttcggtacatatgagattgtgaaggaaatggctggtggcaatgtcgacgatggacatcatcccttggctgccggtaagattttcggaactgttgaattgatatacttgtgcaacaactgacatgatatcgtgcagctatgagtggttcggccgctaccattgccagcgatgcgctgatgaacccatttgatggtaagtgacccatgtggcaataaaccatgcccagctaactcctctccagttatgaagcaacgtatgcaggttcacggctcagttcacaagagcctggcgcaatgcgccaagaccctctaccgcaccgaaggtctccaggccttctacgtctcctaccccaccacactttgcatgaccgtgcccttcacggccactcaattcgttgcctacgagtcgatctcgaaggtcatgaaccccaagaatgagtacgacccattcacccactgcattgcaggtggtctggccggtgccttcgcggctggtcttaccactccccttgatgtcgtaaagacgctccttcagacccgtggcctcgccgagagcgccgaggtgcggtctgcaaagggtctgttcaacgccgctgccatcatcaagcgccggtttggttggtctggcttcctgcgtggtatgggccctcggattatatcaactatgccgagcactgcaatttgctggtacgttccattccgagactcggttctttaatatctgatctttactgactgcttctccaggacatcttatgagatggctaaggcatacttcaagaagcacctcgactaaatgaacgacttgatcctctcgcatgtggctcgccatgggtcccatcccatggacttgctacttgttcgatataccacgtttgtgtgtgcatcatataatcttactttggtctcttcgggcgacatggggtctgttcttttacaatatgttatggattggggagattgggcggagcccagcaaccctcattgtggcgcatcccgagccagcatcgctcggggtttgatcttgcatgtttagggcttttcatgaaaagcgtttcggcaatgtatagttttgggggaaacgggacacggccactttcgacttcggagaacaaatctggtgcttttctttcttattcctggatacttcgatgaatctcttccattcgatgtgtcctatactgtgaccggcgttggaaaaactctggttctttatttttgtttcctgagagggctgggttctcttgtggcatcactataacttatgtttttttagtatcttgcatgtacccatagacgttaggaattagagatgatatcttttactcaattgatttgtataaaaatgcgacgatgtagctcactggacgcatgcagttaactccgaaatcgacgacgtcacgcgaaaaatcctccccctccacctacgggagatcatcgctttcaccaactccgccaacttgtccgtgaaatggatacaggcgggcctgtatattccaaatgatgcgcccacggcctgcggattccttgcagaagacgtacgacgagtgctatctcgcgtgctccaccgcggtgtactttgagggccaggtaagttcactagtccgactgccgctccccgatgctcactgtatcagaacaacgaagacgaagcattacggtcctggagaaccgccctcgagactgtctaccatcacaatgcccgtcgagtaccgccgaactataccccgaaatccgaaaccgagaaagccctgcaggactccatccgggcgctggaggtgcaatgccgggaacgagtcgatctactgggtgctctacaagccagcaggagagaatctgcagatggtagtaaagagaatggtccccatgtgaagggcaagttagctatcatgccgccgccatcgacttccaacacccctggctggattggagatggaacaatccctgctgtgggatacaccgacctttccaaaccagccgccattcccggtcgccctgtgctgccgaggaaaccaagccatgagccaccaccagcttacgacgatgctggtccagcgaccctctcggcagctggcacgcctgcactgcgcgtgaactcgaactcttcgggcaaatcgaagtcgcgtggctccagtcccgagcaccggaaacccatgttgacaacactgcgtagcagcgacggcaagaagcacagtaagaaagtcaaggtcacatcaaagaagaaggacttgaggcctgctgcttccacagctgcaggcctagcatggggtagcatctatcgctctacatcgggtaagaagcctgtgagtgatgcggctctagtctcatcccgacaaagcgccgcccacgatcctagtttccgccgagagttagacccgaaatctagttcgggagacgagcctctgcagccgagaattcgcctctcccgagaccatctatccgcggaccacatccctgctacccattggcgcgagcctcctagttcatcatctccaaggagatcgtctcccagactacctcctcaatcgcctagtcagctgccgccgccgcggggtcctcgacctcaacctggcagccctaaaacacaacatcctccgcattcaatgaccatgccaaacccggctgactttgcctttgcaccacctaaaccatccatcaaacccaagcctgtggcgttacgatcttcccgtcaaccgacaagcgatccaatacaagccagcaagtcggagaatccttctcggagtatgacgcctcggcccgaccgtgaagcacattcctcccacgataagccgcggacaaaatctgcacccaggcctcccaaagctagcgaaacatcccgcgcttctccatcatcccctagcggtgatgatctccatcacggtgtcgaccggctggctatctctcaaggacatagccatagtacgatacggcgaaaagccccaccagtcaaacaagaacagacaccactgtcaagcgaccaagagtcttcagagcatcggaacacagcaagcgatgcagaggacgaggatgaggaagacgacagtgaaatcttaaaaatcatggaaaagttgcctaggggcgtggatccccagtcagcaaagcaaatcctgaacgacattgtagtacgcggggatgaagtacactgggaggacatagcaggcttagaaggagccaaaaaggcgctcaaagaagcagtcgtctacccattcctccgtccagacctcttctctggtctccgcgaaccagctcgcggaatgctccttttcgggcccccgggcaccggaaaaaccatgctcgcacgagcagtagccacagaatccaagtcaaccttcttctccatctccgcctcaagtctaacatccaaatggcacggcgaaagcgagaagctcgtgcgcgccctcttcgggctcgccaaagcccttgctccatccatcatcttcgtcgacgagatcgactccctcctatcagcccgatcatctggctcagaacacgaggcctcccgtcgctctaagaccgaatttctggttcagtggtccgacctccagcgcgcagctgcaggccgcgaacaaacaagccgcgagaagaaggaaggcgatgctagccgtgttctcgtcttagccgctaccaatatgccctgggacattgacgaggctgcacgtcgccgcttcgtccgtcgtcagtatatccccttgcccgaacatcatgtccgcgagcagcagctacgcaggcttatcagtcaccagcaccacgagctgagcgacgcggatatccaggtcctggtacaggtgacagaaggtatgtttctttcccgtgtatccttttttttttcccatgctctagttcgtcttgctaattgacattaccaggcttctccggctcagatataacagctctcgccaaagatgcagccatgggccccctacgtaatctgggtgaggccctcttacacacacctatggaccagatccgccctatcaaattcgaagacttcgaggcaagtctgtattctattcggcctagtgtgtcccacgacggactccgaaaatatgaagattgggcaaaagaatttggcgagcgaggtggatagagtagatttggatttacctcatcttgagcttttttggttctgctctgtctctattttacacctccttgtctgtggggtccttgtatcttagatagaattataaaaattcaatagcgattcttctttcttcttctgttagcttgaacctatattcaaacagccaaatgtgtcaaatttaaatttcagagatatatattttggaaccgacctgacccatcgactgatagtattacactataaaccaaagctcggggcatcagcaggtggtttcattgtacatttagatatgaattaagtacaacctgtacagggaatatatagatcaactcaacaacacccggatctctcctgttgttcgagggaacaacgatctcaaactccacttttcaccctcgccttcttcgtcctccttctcactggcttctgtcttgccatcggatttaccactccggccgctgacactagccccggttcccatgcccacatccactgttcctcgcgcctcgtcggcggcaataatcatgccttcgacgaactcgaaatcacgacagaatgcttcgactgcatcctcggtgacgctctggataagggaaagactttgtacgcgcttcagattatcggttgcgtccatgagcgcagatgggaggaagtcgtcgagttgttggctcgatgtaatcagggactctggttggaaggctgggagattggctaaatcggctagctggggtttctgctggtctggcttttcggtcttgtcttcggcggtgtctgagaaaggctctagggcctctaagagcgttttcagaccagaggcctcgaggaggaattggtgttgggtatcgagaagatcgttgcgtagggttgataaggcggcagaaatgggaggggcgtgcgtggagctggcgaaggggaagggtgacacagctgcgcgggctgcaaggagtatgtttgtgcggtaaatggactgcgctgtggtggtttggagttcatcggatgaggaccgggctagtgttaggaatggatcgaaggcggcccggaggacagaagtgaacgggttctcgttgttcgcgtctggagataaatcttctggtccgacggacgattcatatgtcttcatcagtacttccaggccttccaatgcttctagcaagaactgtggaggcgacaggtcgtctgatggagtcagggcaatgtgatcgcccgctaaggcgctgatctggtctcgcatcaaagtctcaaagtggccaagagtgaacttttctaagctctgaatcagatccaccaagtgcgattgttcgcccactagtctggtgaaagttgtgcggtagaaggacagcaagttcaccactttgtagcaagtaacagggtcgtcatggctctgaatgacaagctctattctctgccgcaatgatcgagacactccattaagatcgcggttgaccaagtcactaagtgccttttggccatcaaaggcaaccgcctggccctcatcgatgcgcgaccagggctcgctactgaggccgacttcaatcccgcgagcgagttcgtccccgtcatcaacaaacaacgactcgagagcctctcgctctgagacagttgtggaatgcacccacgcaagcatgtcaccaatgtaccgaagtgggtcatgcgctgagaactcaatcggtttgacagtgtgatcaccggcgccaggcccattggccccggaaacagcatcagtcagtgcatagtggaaagcatcggacagcacatagtcccgcgcctccgcaaagaaatccagacagctgtggaatagactcgggcgttctgccagcactcgtagagcgcgacggatcgtactgcttatgcgagggtcctctagattcaaggacctgaattctttttggatccatcggtagagcttttgatatgctgagttgaggttccgggtgctcagttccatcacctccattcccagtcgctggttctcaccgccgagcaagacttcgcaatcgtgatgcacttgcttgacacgagctagcacgtcaaagaaccgttcgtcaacgggctcctcggccgatgtcaagactagtaaatcctcttccggaactaagaaatgcttcgaaaaggcttccaacagctgttgcttggtctcggtctctttcttctgtgtcatcagggtgctggcctcctcgagtaccggcgtggtatcctgcttcgcgaggttgattcgtttgcgcatatcgtcgcatgtctggttaagtgttgagaccaccgttccgattcgtctcaattgctgttattgccatttaggaattagacttctggaccccaatctctaaaagagcaataggagtctcacctctgccacttttccaaagtccttgacaatctccgcgttgcaatcgacaacttctttttgcacatctagtcgtagttgccgacgtgtttctgcagtattatgaatgcccctcaagctcaaagtctcgagggagtctcgaatgtctgagtccgcatacgacgccgacagaactgttgtcaaccgattggtgagggcgttcgggcgctgcattggcggggataatgaagatgatgcggtcggcgtattagcgccattactggtactaccatttggtgggaagtagctggtcattgttgtttgagcaaaccagcggggagtcggcgaggggaagtagaggacaacctccgacttggcgcatcgaccgccttcgccgcatcttatcgtcaacacattactctacttatttcccctgttgattcgctcaatttattcagttctggaattgcattgctacctgaacgtatggatagcccactcgtttcgccagccaaggcccgccaggctgctattcaagctaaagattgggcgtacgtgaactcctggctcaatcgacaatacgcgcccaacccagttcccaagttcgagcgcaatgaagataccctacgtgtcctcctgaccctagctgcagcaaatgatgctgcagatgaagaagcttctctgcagcattgcgcgcgcgaagaggcggtcgaggcatacaaactacgggaagagttcgaacgcaaagatccccatgaacaagtgaagaatcaactccttgatgaagtggaaagttgtttggatgataaaggaagatgcgatctagaggacctcgccgactctgccgtagctctgggcaataccttaaatccgaccccgggggatctggggcagtcgattgtggagctcacggtggaggagttcgaggcccaggagcaaattgcaaaggtcgacacattgcatcggtatctccagcgagagttggtacggctacagacggagcttgaggaattgaagaccgatgtggcgtatgagacgccttccgatacacaaagcttgacgtcggaatggatacgcggcacgaagacacttgcgatcaaggttggggaataccaagatcgcattgcatcattagaaaaagtccaaccccgggggccaactattgaagagctgttggcggaggaggagaatgttatcaggatgcgggagacggtcaaggctctgcaaggccgcgtgagggcgttccatgatcttcccaaggataccccaggggcacgggcaaagtataaggagctagaacgcgagcttaaacaacttaggcgacaacgagattcaatggtagtataggcggcactaaagccagctttctacgtactttggtcttccttctacaacgtttggtctacataatgaatgaagcttctcccacttgaagatgtattcaaagagcaggccctctggctaataaaaagctgcaaatggtaatgtcaactcatgatgagtcttgggtgcagggctgcccgcaaagtcatggaatgatcatgataatgactactcacctaagggagaccatcttaattgccgccgaggccgagagcacccttagccttatcaccactagaggtagttaggatataaatctttggttccaataacagagtaacttacgctgacccagtggcaccactgcggccgtggttgtcactgacacgctggatcttgccgaagccatcctggtttatacccttgctatcatcagtcttcaagccgcgggtagcgcgctcggtggtgtcagtgacactctccttggacttatcctggttgggatcaggaatgatatccttcttagacttgtcctgatcggggtcagggatgggctccttcttggcctctggaggaagaagtagtcattaacgatgtcttaacatcttgaaagataaagcagtggcacatactggtggtaagatccttgcgaccagtgtcggacatgatgaagattgattgaagtttggtgcttgaaagtaggagtaaactatgtagtttggaagtataagatgttgacgaaggaagaatagccgaaagggcaaaaggggggtttatatagacttgtctggcctcattgtaacctctaaaagaagtgttacatgactttcattgtttgctatcatgatcggcttcatttacaatatacaccagatgcaagctaggcaatgtataactctacagatctatttgggccgggaccccggactaaccacaacctccagttaaaatcgcggctcttccaatgggcgtggttcctaagtcccagctgtatccatagatggtgccctttcacgacatataggctgtggcacacgatagtgctcggtttgctccagcaggctttctagaaatgacatcataaagatggctcgggccgttgccacgatattttaagttatgtacataaatcacgggactattcattatctatcacatgttttgcagtcacatgatacagtggcccacatttccaggggcaaccaattctaattggtcaacgatatttagcagaatgactcaccgcctccgtcacctgcttgggcatcaactgtaagtggtctgtctgtgatcaactcggtcgctctcattctcattttgactcacaccatgtgatctgttcttcttcatgcacgagattgtcaatttgatcgttatcgtcgttatcgcttcgttatcgtgcttttatttgctatcggccaaaccctaacacacccgctacatcggtctcattaaactgccaatgactgcgtcggatccccctgtcccttcaaattgggactttactccagtgcatgacctactgcagtcacccgctgagggctgcattgctagacctggtcgtcacaaagaatcaaccatctcctcgcttggtgaacaacaagccaaggatgatgtccgttacaccactaatggcaggcgtgtggatcctatcacccagcgcagtagcccagagcttggtgacttcggttctctttgggagcttctcaatgaggtcgctactcctgcaagtgtcacaccaactttagggtccgcaaagaccaccaagtccgagctggaatcgctcgatgaatttcttgctagtttagcggaaagacccacgaagagggtctcattcactggcctctttgacattgaaacatccattcccgtttcatacaacacccgtcgcaccatcaatgagccaaatcctcgggtcctcaaagacaccgccactggctacgctttccattcttcttctcggcctgaaacgcacgcgacaggtattcctaccaatctcgagagtccaccattcactatcttaaagcggacctcggttattgagccttctggaacgagtgccaatgtgaaatttggtgtcccacgaacacccccgaagatgattgccagagccatagttggtagtccaagtgatacacccacggcgaaatccaagtctcggtcaggcagaaaaagacccggaaggaacgcccgcaattgcccagtcacttctgaagaaagtgctgggctagaatcggacacaagcgttgtatttgatcattccgtttctgatagatctttggctatctttgtcccatctcaagtgcgtacacctggagcgaagactcaccgttatgataccccaccgtcgtcatttgacgatcatgactggatactgaatgacgatgccatgcgaggacttggttttggaggtactcatgtgcagcctacccgacagctatcagccgcggagcgaagaatcgccctgatgagcagactcctcgtccactttcctgattacgccaaagtcgtgtctcaaatgggactggctttggagtatcgtcccgataatgatattagctcacgtcctattcatgtctttgttgacatgtcaaacgtatgttttagtcccccctctacccaacttttctcaagctaactcacctcagatcatggttggatttcacgattcagtgaaagcctcgcggaacatccctccctcgacccggattcctcgtgcccacatgtccttcgccaacctcgcattgatcatggaacgcggccgtcaggccgccaagagggtcttggtcggctcggaccatcttccctccgtcgatgaagctgagagactcggctacgaagcgtgcatcctcgaacgtgtgcacaaggtgaagtcgatcacaccccgtcgcaccatcaaatcgcagaagtatgcctccagcttccagggtggatctagcggtcctgaaacggtcgccacctctggagagcgatgggttgagcagggtgtggacgaaattctacacctgaagatcctggagagcattttagatacggtccacccggctacgattgttttggccacgggggatgcggcagtggccgagttctccggcggtttcatgaagatggttgagcgcgggcttcagcgcggctggaatgttgagcttgtcagcttttcccagggcactagcaacgcgtatcggaagaaggacttccgcattcggtggggagaccagttcaagctggttgagctagaccggtacctggaggaactgtttgagtgaatggcgaagcctgactccgttgttaaacggagatttactttgctatttcaattttaaatgcaatcacgacacctttgttagtaatgactcaaattccttgaatctgtgactcgagtcgtttaatgtagctcatagtcgtatactccggattgagtcaactccccgccaaaccgccagacgtcattgggcggaaaacacccgcccgcacttgttgcctcatgcacgctcgtctacctaaacgactctccgttctggaactatatagtctctgttgatccgtgctactctccagtattgtttgtcttcttctatattgtcgaacttcaggcaaaagaggaacagagaaaaaacccgcaatttctctcgaagaatttggatttgctcctgcacaaccagcagaacgtccttgcaaaaagaaagaaaagaaaaaagatcaaaaaagatcaaaatcggccttacaatcaaaacatatcaaatccaccatgtctcaattcacagagcaagagttcttcggcggagccattcgaggcgtcgtgccacaaggctggattgattcgaggtcagtatacaactctccaatgcatcaagttcccattttatcactccaatccattcccaataccatcccagaacatcccaatcaaaaagaaccccgaaactaacacccaatccagcactctccgcgaggtccccgaccaccaagagctatggctctcaccaaccactctctccaacctaatcatcgaaatcaaccagcgcgtcccacaagacgaagctctcagcacctttgccacgctcaaccagcaactcaccgccgccccaggcagcggtagcgctgcacccgcaacgacagaaactgtcgaccaagccgccgccctgcaccacctacacgatctctgcgacgaaggcgacaccatgcaggtgatcaagtcgcccacgcgcgtcgacgtccagcttgcttcttcctcgcctaccccttccggtgtccgggcgtatcgcggcattgtgtccttcacgacgccggtgcgcggcggcggtggacgcatccctgcgtcggctgaggggtctgctgctggtgttgcggatgccggaatgttgggcgcgcaggtggatgaggtttctaatggtttgccgcaggtttcgaggttgacgtgccatttcttgattgttagacttgaggcgcaggatacggatttgttggtcttctttaatgtgcctcatgaggagtttgataagactggggatcctaatgggttgtctgttgaggaggttcttgctgaagagactattggggctttgactgggagattgcagatttgtgattggggtctatttgtttaggtcttatggacttggatttagacggcagattgggactgagcttggggagatatggttgtgatagctgggatttgggacagacaagtgccatttgcgctttgagacgagtagataaaaaatgaaacattgacttccaagcttatcttgtatgttaaaggaccaccagtgctttaatctatacataaatcaaaggttgtattgtggtatagtgctatctagtaaagttctatagatctagccatttcatagtcggcgactctcatatatccatcggcattgcagtccattctgttgattcgtcagactcttcagaaacacaccgttcacattggcacacaaaacggaacgattttcgaagatgctcgcgacgcgaagtaatatccgtatattgtgttaggtcgaagtacgagatgcaacattcctcgcccggaaaaatatcgcgggaggcggtgaagaccatgcggcctttatcgtcggctttatggatgatctagtggtgacttagcattacactcacacatttacacctcgggaaagaattccacttacatttggcagacatgaatgattagctatagccgcagtggggtaaacagcagcagcatattgctcccctctatcgaccggaggatttggcagggggaaatggcctgtttcgcgtgggtaaagaccaaatgagtttgcttcttcctgacaaatgagatgaagaacacgatctgcactcatctcatggggaagagcgggattactccggagatacttcttcacaagaacagaccaagaccggacctcgtcatgaggccaagtatcctcagaaccacagagcgactcaataccactccatccatgcttccaatgccttgtcgactcaacgacaccaagcgctgtccgtccatgcaattgacaatgtcgcgcagcaagtagccgaagaatgacccacagcatgccgaaatcatattcactcctttttgaccggatagtgcccgcataccgtttgagccaagcacattcaaatccatgtcgaagactatcagcgtcacgacatgtgctaccgcaccacgtcacatccgggatacaggcattcggacatggactccgggcatggcgaggcgccggccgattacatgcaggattgctgcagatgagattgtcgttggtagcgggttcgtcgacgaccgggatgactgcgtacggggaatcgacgaggagacaggcgcctttggggacgggaccggagacgcggaattggcggcctttgatcgcgtcggtgctttcgattagctgtgggtggatccaatcgggctgcgtctgggtgattcctgttacatgaatccggtccgagggttccgtggtgatatatacgacttgagacatggttgggttgggtactttgggggaatgtctaggtctgttttgggggtttgtttaacgtcggtttcgacggcaaattcttttgcgcgtccattattgcgcaggttttggttcctggcctgtgggtcgtttgattcgcctcccggatgtaagggcaatgaagttatccaagcgactacgagtgattggggtcccacacacgggcatagatttgttgactttattggctgatctgtatttttagcggagtagcttaattgatccactttagatgaggtagtgcgtagatgatagtagcatgttatataactagcttctctgtaaaggccttatcaaatgtcacagcagattgaaagtacggtatggcaacaatgactgaaccaggatacaggttgaaggtacatgtatgtgagatctcaatgcacctacagccacgattcggtaggtgttgaacaccaccttgacatcgacacccttgtaactaagtttaaaaggtagtagctgtataatctagaaatataggtatgtagtatacatttgagttcatcttagcttcacctgataatgactagtcactgaccctgcggagaagggtgagctcgtcgtcagtgctagctaactatatactaaggataaggtaaggatagacatgtatatcagaaacttccaactccccccctacgccctcgcctggctcagcatatctgccgagcactcgtcggctggctgaaactcctgaagctcgatggcattgcccccatccccatcctccaccaccccatatccaacgcggaaaggcagctgataaaaccaaaacaattgaaaaaaaaggcttaggccatcagggatggccataatcaagaagaagaaaaagatttgtgatatgttcaacaggctaattcatccgttgtccatcgtcaaggttggtccacgatgatgattcattgtatgcgcccgctgtggtgttcggctgctgttggttgatgtctgggcggacgagccagccaccagagtagtatgatgtactgaatatggtggtggagggcattggttgtagtacatggcggaggtctttcatatccaggacagagcctccgacctctatcccatgggcactacaaagattttacttttttttcttctcttttcttcaggaagtgtgaaggaagggttcaagctaacttggatgaatggtaaagcttcgtcctttgatgttgattgtgttggcctgtttcacacactgccacctcgttcgacatggtaataaacccgcttgctttgacaatatgtccaacgtgtgtaaagcgatgattattccattgtgatggtgtgtgtgagaggaggagaagagaggaagagggaaagagggaaaggccaataaatagtctacgtagctggatgaagctctaaaagaggagtctcgaatatggtcctaatgttctgggagttctaagctatatgccattgatcgcactacctgccttatactacaatttacttcaaggcatgcaagcccctctctcgcaactcccagcggatatgggcccgccccgagcgcgttcgcagagaatatataggcaacacctgcacaatataggttctttgcgatgtgttgtctctcatatctcgttacttggctctcaaattcgtactttccgcctctttggtgcaccatctcaaatgcgcaaagatcctccaatatacatcctcggccgcatcctttcctacaataggatcaagatgcccatacccctcgactaggaacctgcgatacagtctctcgccgaatcgacgtcgcagcaactcgtagtccttgagcgtagactcaggactgaaaacttggttctccgtacccgagacaaagagaatcggcaacccttgcagtcgctgcaaattctcatctgtcagaagaggacatgaatcattatccatgcaaatcccccgagttcccatgcgaaccacgtgtttcataagcttcgtatgtgtccccgcgaaaaattggtgaacattgtcatgcagactcatatcaaggttctcgtgattccatagtagcccaaaagcaaaagatgtccggtgacacgctgtagatgtgcagatgtcccgcgtgtgtccaacaggatagagacgaaggagcgtatcgagtaatcgttggagaagaacactcttagcactgctgacaatcgggaagtaattcccagccagtaattcgtagaactggatcagcagagtcgttctccccttgagggagttccagtacccaaagacctgattcatgaagactgagttggcagtaacgccgagaagttggctactttggatggttccatccagcaggcccatgcagagagccaccgagccttggcaatgggctaccacatagggcttctgtcgctctttgtcgcgaatatatgctattgcagcagcaacgtcaagacggcagtcgaagactgtgcttttctgcgcaaccgcgggatcacagccccagcgaggggtgagtgcgtagcatcggtgtccacgctgtgtgagatactcaaccatgttgcagcgcaaaaatggcagtgaatacaaattgtgcatcgcgccgatcccagtgactccgggtagaagtaggactggtgcaagattgcagttaggtcctggctcgtctgtcttttgtgcggggagtgggtcatatatatcaagatgtatctgtacgccatcgcttgcggtgacattgcacgaggtagaaggtggttgttttacatcggtgcctttagttgagatctgagggaagcgcatgcggacgaaagggcgaacgaagaacaaactgatgtggtaaataaaagaaaccaaaaaccacaccaaggccaagataagactgatctggaagtcttttgtcgtccgaaatgtccgcatctgcttttggaagtctagcaatgagatatgaagggcccctgctccaatagttgtcccgtccagtcgagtgatattgacattcaccgtagttgtcgcttcccaggtctttctggcggaaaaggctatgtttgtgttgatcagcttgtggcctttcaggcggtactctatgccctctaccgatagcagcttcaggtgatatgatatagctgatgattcggcattctcctctattggcgtgaaaaagtctaccgttccttcgacaatcttgagcgtggctctagataatgcgtaacaagaaatcgtcccggtgcatattccttggtattgtgaatctgtacatgtgagcattctactgccagagtgctctctcgactctcggtttctcacctcggcagatttcgatcgtaagaaacatccgcatcgcgcaagatgagccttttcctaccctctcagaaagcgcaaaacttccgttatccgaccgcatgctgatgtgcccatgcatagtctctgtgaatttccatcctatcgactgcgatgttttctcggtactgtcttgatggtcttggaaatcgcacgatatactaggcttgcagtaggcgtttaaagtctgattttcagtctcaatatcaattgataatccagatctctcggtaatcaaactgacggatcgctcggagagggctgatattgtgccgagtgggttcacgcctatcagaatcagcacatagtaagccataaatttttacttgcaacatacccagggctgtcgggatgatagatgcatcacagcacacgaggcctttgtatacttcaccattagagccactgaaaacctctcctagatgatttgtcacacccccatgccctgttccatcgttgctcatgttggctcctccaaggagatggactgtggtttcctcctggtgacgacctttggctatgtttagcgcagctttgttatggcttttatcgattgttaccgtaaaaataggaaaaccccatccttgagcctgtgcgagcaaaactctcattgaaaaggttctttatccatttgaaatgctcagatcgcccttctcccggtccccggaggtacaatcgatcatccttcaagatcaaagttatctcgttgctgtcatgagacatcaccagataagttgaagtccgctgaagagctccattgtatgcatacggaccgaatagcagagacttgagagaggcaagggtcttcttagcttcttggcgagggttccaaagacaacacagcgcctggctcttcatagtttgcagggtgagcatgatttggattaccgggttgaacatcgcaggaatgcaaccatcttggataacatatccagaaagaggattgtccagaggatcaacgactcggttatcaataacagcagtgactgttgttccagggggagcacgcgaggattcaccggcgatcccgttgatattagcatatccgttgtaaccttgaatctgtaaatcaaatgtgctcggactgatattctggggaagtacgtaccaaatatcaaaaagtccccatttccagagagattccttccaacaagcggtgacatatggaggccgtgctgctttgaccgaagcaagacttcagtagttcctagagcgccagccccaagaaaacagaactccttctgtgattgaagtagaaagagtgagttgatatgtccacttccgaagtgaattcgatacttactgctttgacccaaaagagttgttccttgaaatgatccgcaaacaccgacctcccacttccatgccaagcaaagtgtatagtgtagcctcctccgtccatattttctacaaatcgaacttcgcatccgcagaatatctcagctccccaattccaggcatctgcaagatatgttgtcgccaccgagttctttgacccatcgttgagaccagtgcactcatggcctgattgtctgtttgcctgcatagggacacctgcattgttgcagccattgtggaaaaatatagtcaacggtactcgatagaaattattcctctttcctagccatctcaactcttcttggagatgcttgagtttgtttgggcttaaatcatccgggtatgtggaaggctgtagcattgtttcggcgcgtgcgtagtctgcattggttattatgaaatgttctccaccatgcatataaaactcacgttcgtcgagcgcagatggctggtccctgatctctgacggccatggactcatctgcaatgttctcctatccgctttcaggaaaaccccggcattgatcaatgaagatcctccaagtcctatgcaatatagaaaaaggctgtcaggtttccctaatcatcaattctagggagatgttgagtatcacataccatgagcagcaaacgaatgctgtccatcgcctaagaatacttggaaaagccgcgtggggtctccaggcgacagccactttgaaatgaaggagccctttacagaactccccgagatgctcgtgttcttcagacattgagagaacgtttgtggaaatgaaccggcttatgggaatgttagcgatggtatttgcttgacgctctcgatccgtacatcttctttcccagccaagctctagcactgcgacgctcttccctgctcgggccattcgacttgccgctactccagcaccatagccagatcctattaccacgacatcatattccggcctcattgatctgaacggacgactcaggttcgggtacttgtccgtcctgtctgtgaaatttgacattgtctctcgctttgagtggaaaatgaatccttagagacacagaaaacaagaaaccgacatatacgtttttgggatgattaggccgatataagcacataagcactaggattcgaagagtaaggattgacacgtattttgcacgataacgcggacaagtagaaattgtcgcatccgaaataggcatggatgagccctgagctggacaacgcctattggctatatttgtcgagttattcttagtccggggtaatctcgtgttgacaagcaagttagcatgaagcccaattcaaaattcacatgatatgacattatttccaactccaaagaggtaatcctgattgtagatccggacaagtgcttatcgaatacgtgctcactgagtaactagttagcctaggggtgagtagtctgcatcgctagtcctatcacgtgcagccctccacttctacaaggcattaatgtaaacaatgcaaaccagaactaatgacccctccatgcatatgctcggtgacttcaaacaccaaggcaccagctgattccaccttccttagctatcgacctaaaaatatgctaccagacgattcagaatgtggggtactcgaacgcgtacaattgacgccttcgatgataccaaaatctcccaattttgacgtcaaagattcccaattcttcagaaaattcaccaagttaccctcaccggaagaagttcgcttgcaggccaaagctcaacatctcgcagaagtctgtccagataatagaaaaaccttctcgatgactggctttaattaccgaacaccacctgtgatattcgaggatctggggctgtttgtcaaatggggaggcattgtgagaacttccgagggtcagtgcctctatgctctcggccagctccttaaagatgatatcccgattccggagatatacgggtggcgggaggatggcggtgaaactttcctttatatggagtatttacaggggcagactctggagcaagtgtgggataatctgggacctgataaccgcgtttcgatctgttatgagctccggacaatcgtcaaccacattcgccgccttcaacagaagccaggagagtcattcgtgggtacgatgctcttaacggcctctttatttcctaaactgcatccataactctttctccacatttaggtgatattgcacaagatcatctatatgatagagtattcgaagtcgagtcgcccgaagcaggaccgttcaataccgtccgggaattccatgactggttcactttcctacatcgaagaccaatgccagatccatatattgtcccaatcgaaccgttccgtcaggacctgcctgatgacagtgaaattaaatttacgcatagcgatctccaccgaagcaacattttgataacacgctctgaaccctatcgtgttcttgcagtcgtcgactgggaacagtctggctggctacctatatactgggaggccagaaaggcgcagtatactgctgacactcaggaatggtctaaaaaatatttgccaatgattttatgtcagtataccagcacttgggatacgtgggcctactacactgcggccctgggagtttgagatgttgagaaaggcagagtcttattgttctggcttttattgatctcttttctgcacaagataaacggcgtcgaaatatcacccagagacagtgtttgttaaatgtgattggtttttagctcaccaccaggtattaggtctaccgcaagtctctcttcatttttccttcctgcttctgatgtgatgttatttcaacgaccaagcaataagttttagtatcttttttcgtgtcttcgtagatccgccggccgagattgatactatccggaagatggtagcgggccataatgccttcttgaccatgccccctttccggaataccccatggtcgatttcaacgataccgagcccttattatcgctcgcattccctactctctttccacgtggggcagctgagttcgtgacacctcgcttgagagccgtgcgatagagtgacgatatactacaccttaccttatgaaacacgagagcggccgctttgtacagcatctacgattccgctatgtggtattcaataccatgtagcggcggcaggcggccaagagtgcgggtttctatgtcaattggcagatagaccggcctaatatcacgattgaggaactgcaagatatgttcagtgaactaggtagccctatcggagagagtgccacctgggtgcaggctattatgaagtctgatggatggtgcatatactggatgttatttatatttgaatgactatataagactcatgggggaaatgcggaggatgagagggagcgcaaagactgtgctgcctattttggtggttggcctgcttgaacaggaaacgaagcagacatttgccgagatcgggaaacttccgtgctcgaaagaaagaatacagatagctccgatgacactgctgtggagtgggagtaccgttaccaactgcgtgatggaatccggtcaagatactacttgcctccgtgaatactgaggcctgtgacatttctatcgaataggctcgccagcagggcatttttgactatagacatcgcaccttgctattcccgactttactacaatgaagcacatcttcttctcccaatatcatatatacataatatacttagacctgatatcctagaaaaataattgacataggtagacattcatatgttcattaaattgggctcattgacaatcccactgccactgggcatacccaactatttacaagcataaacgggttagatatcaaggatcaataaccacaatatccttctcctcaactggcgccttaacaataggcctcttcggcgctacagccctcggcaccggcttgatctgctcaagaccgccccggcaacggccgcagaagtgacgcttggggtcaacgctcttcgagtgtcgcccgactgtgaacccacagccctggaccttacaagcccatatgtatttgtggttgatctcgtaggtgtgtttggtcgtgacctcaacccggcccccgtagatagggtggccttccagtgcgcggacacatcgggcgccccattgcttgaagctggcgccgtgctgcgccgtgccctttgtccggttttcagtgaccatgatatcgaggaggtggcagtattcgtgtgtcatggtgcagaggatcttgtcctcgctgtccaggactttctcggagagctcaatggtggcataataacgccgtttctcggggtcttccacgccggatgctcctttcaggaacctttctgaacggacggttgcccggccggcggtgtttcggaaattctttgtccagatgattttgatgccgccggtttgctcggtcatgcgagtaatctggtcattggaggcactgtcaaggtgccggaggaactcttcggcaaagccgatcttcttttggttgaattcggctacttgggctcggatctcgcgtttccgcgctgcctcggcctttttctgggccttgatggtggtgggagtacccatgccgggcgacctgtcaattgatatgatagagcgagtgagagaaaggtgaggcttcgctcgtgacggtgtcacaggtggtagctttgtatggcttaggtagggcttcgatggtaattcatcctctgactctgagctgtgagatgtagttagtatgttggccgctgccagactatgagtgcacatgaatgcccacatagaacttacttgcactgttctggctgcgtctgtgttgtagactcattgtcactgttcaggtcaagctcctcgaggtgtttgatgaggtcgctagagttgtgcaggccgaaatgaggtggagagcatgaatcaacatgcttaggtattcctgccctacggataggggatgaagatttggaactggttgcaggattcggtgtgcagtattcaggcgttgagatgactgcctttggtttctcagttgatcggtccgtctctttcaccaacttggtcatttccattgatggttcctcatctgcagtggtgttggattctgcttctgatataggtcgtcttccacgcatgagtctttttcttggcgacctcacaggcgatggaaccgggctaggttcggcttctatgtcggctgtctcggaatccgatgtctcaaaggagctaagctcttcattgtcactgacaatgaacccgtctagtgagtcagagctatcttcttcttcaaagctgaatcctggctcctcttgttcctcttggcggtcaatcacgggctgtgtcgcaacgaaataattcactctgcttcttgtgggagcctgtgtggcaatcggccttgttggcgttaaatctggagtgcgatgtccatctgtggtgtatcctgccacatcgttctctttgtcgtaatcttcagtctctcttcggatggcggggcgtggtctccgctttgctggtaggagtaacgagttcacacgtgcgagccctagtgttctgtgcttttgctgcttttcggtagacttgtgctgtccagattcactttccgatgctgagtcgctgtcggggaatatatcgaatgatccacttgaactctttgcttgccgttgcgatttttgcggcttggtgggcatattgtgtttgactttgttcccaagattgagacatggctctccaggtggtgaactgttgtgagatttccctgtgcgtgggacagtctcattgtatggcgtgtttttgactagaggattggctgtattgacccttgccatgatcgcgatgttgttctgatggcacaatcttcgtggtgttaatcggttaatgatatcctataggtgctaatggcgatgatgatgatttctctaaattagttgaactgtgtttgcgctgaccaggtcagtgccggagaccccggtgtttttcgttgttggtgtcatgtctgttcagctgtcaacgaattcgttggcacggcaacgtatgtacccagccaggccccaactcttggcaaatcgggaaacctcgatcctttcctatttgtcggaggctgaacatggcactgatccgatagtcgctatatcacattcgcataacccattgggactttggtgttgtattgtagacaggcccctgcgcctctgctagagccgcaacagcaaggaaacattgccaacaaacaaaggcgtgttgagcaggtggtgcgttttgctttcatcagtgttcagtcaacagttactacaatcgccgcggtagcctattaaaatgtactctagtctcctacaacaaatgttgcaaagtaggaactacatcgccttcgctatgaatcgatcttcacacttgttcatttcgatacatatgtgacttccggattctccattactatgatgattgtaattcttccatacggatttgaagattcacgcgaataatagaagaactttcgacggatattttcttccagggtacattgagtgtgcttcgctgttcaccaagtccgtccatccagttagatccttgactcagtccgtcttcggagatggcttagccaaacgaaacagaacgtagtacttgtcatgccactcttcgtttgcatcagtacggcctgcgcgtgaaaaccccgagaaatgcctaattctgtcagcttatagtgctctccattcaacaacggataaagcgtacatattcccggtggcctttcatagatgatcttcgacatagttgacatacacggtaggtaaccgtgcttcttcagctttctaattttcatgtcaattgaaagcacgccaggcagagagttctgtagacttacggaaaggcttgacaaaatttatcgcggatctctcggcgcgactcaatttctagcccccagaattctccttccctgagagactccctgggaactttgtcccagaccaaataagtgatatagccctccggaacgatactatcttcgccttgctctctctcttggtaagcaaggaggtcagggacaacattgcatccatatttattgagcactttcaaggtcgtcaactcaacgtgcggttgtggcttagcagcctgcttttgtcgaatttgagggctctgatattgagtgccaatgactggaatttgaaaataaatccgcataaaagctttcttgctaggatttcctttggggggcagagaaacttagcagctgcgtacggaagtccaaggccatcgtcaacgtcttgctgcatcatccattcagaccgttcagagagcgtcttatcgatcacccaggtctggcggggcaggtggagaggcggctcggatggtggatcgagagtgatggccgtgccgtcgaggccgcacaggagctcggcggtttcgggattgtccaagctgacttgataagctttgcaacgatggatgaagacgtatttttggtcaatgaaaggttagtacagctggtgtttgaacgagagtgaaggaaacgacagttgttgatgggaaatgcaaagcgtagacctcctcgagctctggtagactgggtgttagggttttggcacccacaacagcttaataataagcaagcagtccacaatggttattccaatccttcttgtactctctaaggaagtgtcaaataatggctggactaccggtgagattagcctacgttggctacaaaggcactttattccacatacgaatttgatggccacggtagctaccttacgccctaattcgaccgaatctactccgtattccgtatacatcgatattatacctccactgcgaatcgttatacaacactgcattgcttgtacaggagaacatgaatctacgcatggcaaatgagaggagcgttaagaagcgcgctcggtcaactagacagaataccatgcgaggaaggtttaaccattaaaaatggcctgcagctagttgcgcagttagatttacccaataagtagcccggactggaatctacttagtaggtctcattaggcacttagaatagaaaagcccacctcgtaggggaaatatggtacgtatctacaccatctccgagtgtgtagtgcattagttcattaatatggcattatggtactcctaccgtatttgtcgtgtcatccacaacactactccaaacaaggctccaatattctttagggaaagaaaagtttgatggttgttaaccttagaagttgtggttgattatatatcggatgcaaccatgacgaaatatataactacattgacagcaaaaacaccaagacaaagtctatttatatgactgtatatactgatctaatatacgttatgtataatgagatcaagtatggcaaccataactcaaacatacaatggatgaagctgtacttccacatagaatctataatgtagaaagatatgcctcctgtctacattgagaattaataaatctgataacaaggtagccatggttattatagcctatttacatataacatacaaggactaataagcgtcaactaatgatcctagatgggtgaaacccagtcccaaagccaaaaccgccgaccgaacaataaaaccatagaagggagagcggaccaaaaccaagccaactgcagctctatgacgtccaatcataaccagcacgacgagaacccgaagaccagacgtgcccaagtcttcaaaggtctcaggtactatcaagccggcctccttgctacaggtacatgatgttctacacggaatggatgtacttccggagcatgcggatcgcaaacggagaagccacattataccgcatggcttgcaactgaggttgggctcctggacggctggacggacctggatcgacacgggcagatggacgttgaccagccattccatcgctctgccgatagagatcggcggccccttgcatcccagcacatagtggatatgcctgactcgttgcaatctgatcggatatagcctccgattggtgagaggatgtgccagttgttcgcatttgtagattgacatcactggtgaacattcctggctctacttcggctggagatgggtagtaatcggttatttgtttagattattcggtgcgagatggcttcgatagaaggctagtgcaaataatgtggcttggatattaaaaatagaggaaataaatgatttacagagagagagctctccatatgggagatgaccatctggagtcctcgggttgatttgttctgctagccttaaggaatatattgtagaactacactatgaaagagagtatactaaaagtaagagacgaagtaataggtacacgctgtactagcacacattgttgagtgccactctacgtgctcatatcatgcgattgcgagcgaaaacgccgcaacagacacaaatttgaatgttgaatcaaacactgagataagacaatatttgagcaataattggcgcttgatagacatgtctcactatcagggatacagcataaagtgatgttgttgctttttgaaatttttgatctaagtacttctagttgtatatatatcgtgagcgagattgcacaaccatattcgaggactggcggagatagcataaaccatgccataaagccataacaccgtactacaatgtaatacctgctaggggcaaaagtataccctgtagtcatatgttaagttctttatgtgaaaggcgggaatcctgattgcttgtttgaactcccatggcattcgattggctacaatagtacatactaattcaaaactccgtattccgtactccatttcgtgcatagacgttgttgtacaagtcatgtggtgcggcaagcttttcaacagaaattatccagtactgttgtacctgtacggaggactccatatatggacacaactacggcctcaaaaataggggctgtgattggctcctggtcatgacgcagacggcggtggaggataacggcgcagaggggcccgggtcacagccccctaattataaattgaatcagtgctcaaggtgcggtcaactcgactcctatgtataactatgataatcattagaggtgccttataaatcaatggatctactgtagagatcgaaaccctttcacggggagccagtgcgaacattgaatataaaacgccctattcaggggccagagccaaaaataatcatggaagcgcttgtatggttctagaaaggccaatgccatggctcccctatgtactccgtaggtccaagtaaactattttctaattaataggggtacgataaataaccctgaatcatttgcttatatttagccacattgaagcgctgtcgtgctagtgtagtgtacacagtattgaaaggtgacgggtcaatacgccacaatcagtacaataaatgtgcgacactagggcacgcctaccggctaatgatcgctgactaggccctttaagaccgatttcgccgaagattatttttggtgcttattatataggagtgcaatccaatcgctatcggcttcttgagagtgtaattgattatagggtcaataaaggccacggtaagtggatagatagcgaaaacccacaggggaaaacgaagatcagatgtcgaagatcggtgcttatgcagctgatgtgtcgttcctgtacctgcctccactaatatgaaagtgtacaaggtacaagtactcaaagtaatactgcagtctgcgagtatatatgtgctacggcatacccgataagcattggcttgcttgtgcagtggcgttggtattgcgtacaactaacatacggaggatggagtacaatattttatggagtagacttctgggtcgaggcttgaaagaatcattaagaaaaaggaatcggtgatccacttgtgtggacaagatgaaatcccgagtctaacggtggagatcttggaataccagttctaagatacagcggtatgcatagagtctcaggtgtattggtacatctatatacagtacacagctgtgttatattgatgtatctgtgacagactatctagattgcacagaggctaatgcatcgataaccttggaagactaaaaagataaatatagtcaatgacgattgagttttcaaacgttatttagcgagtggtggaagatcaaacaaggctagcaaaggctgtactgccaggttttctcgtggtacaggatccaccgataacatccactatggcctccgtacgggggagtacatgtatgggcttgccagccacagaataaccggcagtggaaagtcaaatgtaatacacatgggactgatcgaccagatttgagacaacttgtattgcggtggcaaatcagcaaacaccacaacataaaaaaaagattcactagttatgaaagcagcaatttgaatagaagatccagattcaacaacagaagatatacaataagcagtctggtagcaaaggtggttcttgtcgcgggggatccatggaacggcagctgaggacacgaaggccacgggtcagagctcaagctgatattaattttatttgagcttcgaatcagattgaagaacatcaggagataataataaacggaatgtaaaatatgcaaattactagttcacttgtatggtccttagttgctactggtcacaaattccagaggcactgactcgccacataagcagatagataagtgtacgtacccgtacctaggtacaatatgtacgcagtacgcagcccgtacattgtggcgaacactgtgagaggcaagtctgaaaatggacgccctctacatagtaggaatggaaattgccggtgcaacgccatccctacataccaagtatagtcaccatagcagagtcgacgaatcaaggccatttttggaacaacaccaggtatctctgaaaatagcttccggccacattatttgttaccggattacatgctggctgggtcgcggtggggcaagtttcaggggccgtcgagactcccttggattccgagtgtccatgggagattgtcattggatggtgagaggggagattggggaaaggtgaaaagtgatcggggaaaaaacaacagcgtaattacagacggacgatatcggtaattcacaaatggtcgatcagcgagagacacagagagagagaaagggaaaggcgtttggtgaatacaaaatacctgggagcgccaataggctgaacttaatgcgccacgtacggtaaacaaaggggggggttgacagtacctgggacaaataggggctaaccatactgggagcaggtatccagtacctgcaactctgacacgtaccctttatagctgtaagatgacggtaaattactctggagacggagccagttcccccccgacccaaaaataacaagcattttctggtcttccctttccaacccccttccattcgctttttgtttccatctttccttctaatttgctatctttcttgttctttctttttgaaggataggagggaggttgctttgctcttcaaacgttcccattgcaccttcctttgcgtgaaactctcacctgccattcgttacggagtctgagactcgttcgacaccttcgcttgggtactcaagataacgcatttctttcctgcgcttgcttcgactttctacccatgctctattagttcgacaacccgaacaaaagaaaataatactttgaatggtctccgaggtgagataggcttgagcttgcatcattattgagctgggcagctaatcccccgcagagctttgagcaataaatcaatcgcgactcgcttgtcatgtcgggctacgcaggcggaggccagtacgacgatggctatgcccacgggcaggcacatggtcaagctcatggggatgctcatggtgactcgtactaccaggacgaacatgcacagggttattatgacaaccaagggtatggcgatggctactacgatcaagggtataaccacccccacatcagaaaatggagtcatgggctgacaagactagtaatggctactacggagcagacggtgttcacgccgacggagctcctggggatcatgcagctcacgcggatgcaggccacggatacgccgacggcggatactacgaggctgggcatatagatccccacgccgcagaaccgtactacgaccagggacaaggggaaccccgaggccgtcgtggtcatgattccgaggaggattccgagaccttcagcgatttcaccatgaggtccgagactgctcgggctgcggacatggactactatggccgtggagacgagcggtacaacagctactcagacagccagtacggcggtgctggtggataccgtcctccttcctctcaagtttcctacggtgccaaccgatcatctggcgcttcaactcctgtctacggaatggattacggcaacgccattcccgccggccagcgctcgcgtgagccttacccggcctggacttcggaggcccagatccctctctcaaaggaggagctcgaggatatcttcttggatctggtcaataagtttggattccagcgagacagcatgcgcaacatgtatgaccacatgatgactattctggactctcgtgcctcgcgtatgacccccaaccaggcacttctctccgttcacgccgactacatcggcggccagaacgctaattatcgccgatggtactttgccgcccatctcgatctcgatgatgcggtcggtttcgccaacatgaagctcggcaaggcagaccgcaagacgcggaaggctcgcagggctgcagccaaggccgccaaagccaaccccgaggacgaagaggaaacgctcgaggctttggaaggagacaacagcttggaagctgcggaataccgctggaagtctcgcatgaaccggatgtcccagcacgaccgggcccgccaagttgccctctatcttctgatctggggtgaagccaaccaggtgcgattcctgccggagtgtatctgtttcatcttcaagtgtgccgacgattactacacttcgcccgaatgccaggcgcgcgttgaaccggtggaggaattcacctacctcaatgagatcatcactcctctctaccattactgtcgagaccagggatatgaaatcatggacggcaagtatgttcgtcgtgagctcgatcacaacaacatcattggttacgatgacatgaaccaactgttctggtacccggagggtatcgagcgcatcgggtttgaggataagacccgcctggtcgatattcctatctctgaaagatggcccaagttgaaggatgtggtctggaagaatgccttcttcaagactttcaaggaaactcgctcctggttccacatgatcacgaacttcaaccgtatctgggttatccacctgggtgccttctggttcttcactgcctacaacgctccaactctgtataccatcaactaccaacaacaggtggacaacaagccaccgacggctaaatacctcggcgctgtcggtttcggtggtgctcttgtctccttcattcagattctagctaccatttgtgaatggatgtacgttccccgacggtgggctggagcgcagcacctgcacaaacggttcatgttcctcattgtcatgttcattatcaacctggctcctggaatcgtcatcttcgccatcttgcccatgctgaaaatgtcaaccaagacagaaaacggcatcggcctcgccatcggtattgtccactttgttatcgcagtcctgacagccactttcttcgcaatccagcccttgggtgcgcttttcggcaattacatgaagaaaggtggacgccaatacgttgccagtcagaccttcacggctagtttctatcgtctttcaggtaacgacatgtggatgtcatacggcctctgggtctgtgtgttcggtgccaagttggcggaatcctacttcttcttgacgctatctttcaaggatcccatccgcatcttgtccccaatgcagatccaccagtgtactggcgcgcaatacattggcaacaccctttgccaccgacagcctcagattcttctgggcttgatggctttcatggacttgacacttttcttcctggatagttacttgtggtacattatttgcaacacaatcttctctgtggcgcgatcattctatttgggtgtgtcaatttggtcaccgtggagaaacatcttctcccgcctgccgaagcgtatctactccaaggtgcttgccactaccgacatggagatcaaatacaagcccaaggtcttgatctcgcaagtttggaatgcgattatcatctccatgtaccgtgagcatcttctcgccatcgaccatgtgcagaagctgctttaccaccaggttccctccgagcaggaaggaaagcgcaccctccgcgccccaaccttcttcgtgtcacaggaagatcaatctttcaagactgagttcttcccacagggtagtgaggccgagcgtcgtatttcgttcttcgcccaatcgctcgctacacccatgcccgagcctcttcccgttgacaacatgcccactttcacggtcatgattccccactacagtgaaaagatccttttgtcgctccgcgagattatccgtgaagatgagccttactcgcgtgtcactttgctggaatacctcaagcaattgcaccctcacgagtgggattgcttcgtcaaggataccaagatcctcgccgatgagacttcgcagttcaacggtgataatgagaagcccgagaaagacgctgccaagagcaaggttgatgacctgcctttctactgcattggtttcaagtccgccgctcccgaatataccctccgcaccagaatctgggcttccctccgatcccagaccttgtacaggactatttctggcttcatgaattacagccgtgctatcaagctgctttaccgtgtcgaaaacccggaggttgtccaaatgtttggtggtaactcggagaaactcgagcgcgagctcgagcgcatggctcgccgcaagttccgtatctgtgtctccatgcagcgttacgccaagttcagcaaggacgaacgtgaaaacaccgaattcttgctccgcgcttaccccgacctgcagattgcatacttggatgaggagccacctctcaatgaaggcgacgagccccgtatctactcggctttgatcgatggtcactgtgaaattctcgagaacaacttgcggaagcccaagttcagaattcagctttctggaaaccccattctcggtgacggaaagtccgacaaccagaaccattgcatcatcttctaccgtggtgaatacatccagcttattgacgccaatcaagacaactacttggaagaatgtttgaagattcgcagtgtcctggccgagttcgaggaactgaccactgataatgtttctccatacacccctggaattgcctcgcctgacgagaaccccgttgccattttgggagcccgtgaatacattttctccgagagcgtcggtgttctcggtgatgttgccgcctccaaggaacaaacgttcggtactcttttcgctcgtacactggctcaaatcggtggtaagcttcactatggtcatcctgatttcttgaatgccactttcatgacgactcgtggtggtgtctccaaagcccagaaaggattgcacttgaacgaggatatttacgctggtatgactgctgttctccgaggaggtcgcatcaagcattgtgaatattatcagtgtggtaagggtcgtgatcttggtttcggatccgttctcaacttcaccacgaagattggtactggtatgggtgaacagatgctttcccgagagtactactatctcggtacccagctgcccctcgatcgcttcctctcattctactatgctcaccctggtttccatctgaacaacatgttcattatgttgtctgtgcaaatgttcatgtttgtcctgatcaaccttggcgccctgaagcacgagaccatcatgtgccgttacaactccgacctgcctattaccgatcctcttgtgcctactctctgcgccaacctgattccaatcctcaactgggtgaaccgctgtgttatctccattttcattgtgttcttcatctcatgggttcctcttgcagtccaagagctgacggagagaggagtgtggcgcatggctactcgtctgggcaagcatttcggttcgttctcgttcatgttcgaggtgttcgtttgtcagatctacgccaacgccgtgcacgccaacttgtctttcggtggtgcgcgatacattggtaccggtcgtggtttcgcaacggctcgtatcccattcggtgtcctctactcacgattcgctgggccttcaatttacctgggcgctcgcctcctgctgatgctgttgttcagtaccacaacggtctggactcccgctctgatctggttctgggtttccctactcgcgctgagcatttcgcctttcctgttcaacccccaccagtttgcctggaccgacttcttcatcgactaccgcgactacatccgctggctttctcgcggtaactcccgatcccatgcttcctcttggatcggtttctgtcgcctttcgcgtactcgtatcactggttacaagcggaaagtgcttggtgttccatcggagaaaggctccggtgatattcctagggcgcgaatcaccaacattttcttcgccgaaattgttacgcctctgcttggtgttctggcaacaggaatcccgtacctatacatcaactcgcggacaatgtattctgatgatcccaagtgggctgcgaatcccatcattcgccttgcgattattgcttttgcccccgtcggtatcaatgccggcgtcgcgggtatgttcttcggcatggcttgctgtatgggcccattgtttggcatgtgctgcaagaagttcggtgctgtccttgctgctattgcccatgccatcgctgtgattatcttcctcatcatcttcctggccatgttcttcctggaatccctcagctggccccgaaccatctctggcatgatcgctgctatggctctccagcgcttcctctacaaggtgatcattgccctcgctctgacccgtgaattcaagaacgatcaatccaatattgcatggtggaccggaaaatggtacggcatgggttggcactccctttctcagcctggacgtgagttcctgtgcaaaatcactgaacttggttatttcgccaacgatttcttccttggccatgttctcctgtttgccatgctcccggccctcgccattccctatgtcgacaccttccattcggtcatcctgttttggctgcgcccaaggtatgtagctcctcatctccacactacgaaaactctgtactaacgaagcatgcttctagctctcaaattcgccctcctatctactctctcaagcagtccaagcttcgcaagagacgcgttgttcgcttcgccattctctacttcttcacgctcttcatcttcctcattattatcattgcgcctattgtgctgcgaaatacgaagcaattggatagcatcttgtccggcggcatctgggacagcctgggtgtctctaagccgtcttcgattggtcttctgcaaccacttgatcacggactcaatgacaccgtctcctggtacactggctctaatatccccaagggctacacctcaggcagcatcccagccgcctccgagggcaccggaaagtggtccatctaatcgccttggcgaaacgacatggaaatgccttgtacaaagttatgcgtttactaaaattcgctgcatttttctgaactcaccggcgcacaatttgatattaatgaatggttgcttccaaatattgtttgtggaatgacgcttgtatgaaggggtcttccaagtcatcctcgggggtttaccttcgtttcaccagctttctttgcttgttttattttacacttctaccggaattaaattgcattgctttcaagaaaatattcttcatgttcgtaatccctaatttcacagtagaatgtccaaagaatatgcaatgcacgggtcaatagatgggtcacgtgtaccgaggttcccaacactccgagtctcccgtttcatcttccctccgttctccacgatcaagcaccactctttcgcgtctcttcttaacctatcatctctcaggtatctcgctggcctggcgtaccgcataaaccgcgctctcttcaaccctccgccatggatctccaggagacccagcgtatcctttccgaatatctgcacgaactcgcagatctattccaccgtgtgcctggctccgcaatcttcctccgctacgtgaaatccagctatcaagatgacccaattcgttctgccgtcgaacttttcctcttcctctttgccgtgcgataccttctagcgcccaagtattcgaccaaaccgggcgtggtaccactgacggaagacgagattgacgacctcgtggacgaatggaccccggagcccctggtcggggacccgacggccctggaagcgatggaagttgataagcggaccgtgattgttgggtatcgtaccccctattgcttctgcctgacgatactccgcggatattttactgacaagtggaatccggctctgtagccctgtaggcccgaaatcgaaactcaccaacggccgcactgtgatgaaccttggttccttcaatttctacaacttcaatacgaatgagtcgctcaaggaacaggctatccagacactccgtgcttatggtgtgggtccatgcggaccgcgtggtttctacggcactcaggatgttcacataaagactgaggatgatgtcgcgtcgttcttggggaccgcggcttgcattatctactcccaggccttctctaccatttctagtgttattccggccttctcgaagcgtggtgacattatcgtcgcggataaaggggttagctttgctattcgaaagggtattcagatctctcgaagcatggtccgatggtatgaacataatgacatggaggatttggagcgcgtgctcgcgaaggtcactaaggagcaggcccggaagcccctgactcgccgattcattatcaccgagggtttgtttgagtcttatggcgacatggcggacttgcccaagatcgtatgtgaacccgttacatgagattatgaattggaatgctgacaactgttgcagatcgaactacgactcaagtacaagttccgtttgattctcgatgaaacctggtcctttggtgttttgggacgcactggccgtggtatcacggagcaccagaacgtcgatgctgccgaggttgatatgattgtggggtccctggccggtccccttgttgctggtggtggcttctgtgctggttcagaggagattgttcaccaccagcgtatttcggctgctgcttataccttctctgctgcgcttcccgctcttctttcgactaccgccagtgccactatcaacatcctccagaacaaccctgagacagtgtcacaacttcgtgaacacaccaaggctatgcgggctcaattggatccccgaagcgactgggtttactgcactagcgcgcctgaaaatcctatcttggttttggtcatcaagccggaggttgtggctgctaagcgtctcacagaagatgaccagcagttcttgcttcaagatgttgtcgatgaggtatgtctacatgttttttcattttaactgaagtccatttctaatatccgcagtgtctggccaacggcgttctgattacgcggctcaagaccctcgaggacaacttccagcctaagcaggttatcccgcccgccctgaaggtgtgcgtcactaccggtctcaccaagaaagagaccgaaaaggcaggaacgattattcgacatgccattaccaaggtgatgagcaagaggaagtaatgccctcccccgccgcttagctctggtcctgaccagccattcgatgactgcccacgcctatatgacggactccatcaatttaccattctcctcagtcgacctacgccctaatgccttgtattgttactttgtcgatatacattcttattgcatcccctgcacaggcccaccattttctctttttgttggcggttgatcctatacctgtgcatggttctaagttgtttaatactacccttctgcccttggctgtttgcttcaaggatgtctattttgtatacattattcagatcaaaaccctcttcgtcccatgaatggacgctattgctatatctttcgattctttgcttcaattgttctttgctatagtagtatacactggacctcagcagcaggccagcagcctcatatctccaggccagactccaaccatataaatgccccttcctccgccacccccttccaatgtctctcaataatatcagataacatctcgctagcattctacttcacatttaccgaattcctcaatgtgtccaagcggacacccgagaatgggccccacattccatctcctccatcattgggagcattcatggttcatcgccgacttcgagatcttgtacgatggccccgcacgcaagatctcctcgtcgagcgaatcagacgccgaaggatttctcaaccaagccaaggggcatgtttgagacctggaagctccctgattccattccctagatctaagcgctatgcttggctatccttgtgtttacaatctctaccaattgagtccacgtaggtcgatctgtgctccagcccgccagcatggttataatggatcggatcggcaacatatgtgtgggtttccagaaggttgcaaagttactcatgttatagacgtcgactaagttcagctaacttcactcgagtgtgttgagatcagtctcccccgggagaacctggctgcaaaatgaagcgccttactcagtcacttgttggcctgctacttgcctgtggtgtttgcgccgaagctgggggtaagaacgatattatccatgcttgtaaaggattttgctgatagcgatagccgacaaacaaccccgtgcaaatctcgctcaaccagcctataccaaagaggtagtcgtctgggtcaatgagaagggagaaaccatcagcacggaaacacactacgtccaggccttgacctctgcgctccaagagaatgttagtagatagaactgttcccgaagaagagaagagatgttggttcctcatcaaaagccagccctaactctctcatcaaagcaaccctcaatatcaaccccggatacaaatggtgcaccaccacacgccctatctaagaacagcaacgaccaccccgtcccagccaagggcaaacccaagaatctaccacaccacccacacaagcaccccaaaccagccgtctcccattcccaccaaaaccaacacccaaacgccaacttcggcatatcctactccccctacaaagcagaccgcacctgcaagaaccaagaagaagtaaaccaagacttagaccgaatctcctcatactccttcatccgcatctacggaacagactgcgaccaaaccaaaaccgtaacgaccgccgcccgccgccacaacatgcaagtcttcgccggcatctacgacctaaccaacttcccctccagtctagacgccttcagcgaagcaataacagatccaaacggcaaaaaagactggtcaatcttccacacaatcgccgtaggcaacgagctcgtaaacggcggcaccaactccgccaccgacgtcgcagccgccgtacaaaccgcccgctccatcctccgcgcacaggggtacaccgggcccgtcgtcacagtcgacactttctccgtgcacctcgaccacccggaactctgccacgtgtccgactactgcgcggcgaactgccatgctttcttcgacgccacgcagcagcctgctggcgccggcgcgtatgcgctcgagcaggcgcgcagtatctcggctggggctggggggaagcgtactatgattacggagtctgggtggccgcatgctggggatgcgaatgggggtgcggttccgtcgaaagagaatcagttggcggcggttgagagtttgaggaggagttttgagaagaggagggaggatttggtactctttacggcttttgatgatttgtggaaggatgataatatgtatacttttaatgcggagaagttttggggcattcatggagggttgtagagctggtggaggttttcttttctgttgctcagttaagttggcttttgctctttctttggctggatgcatgcaattgttcgtgtacatagatcactctggaattatcggatagtcgaatgaagaacgaggtattaacaaagtttgatatggttcgctgatgatactacttgtacatgatattgcagactatacattagaagcaatccgttcaggaacaaacagagcttagctgcggaacgtcagagcagcctcgcgttgcttcgcctcttcctccgaacgcgcctcgatctgatccatccagccatccttacgggtaagctcatcgaaagcctccttgttcgacggaatatcccagaagaaatctttctcgctcggggatgtccgatgagcctccacgtcccgggcatggcgaataataagtgcagtcagcatgccgcgggacttgctactcgggttgatgcccagctggttcatctcccgcaggatcgatgttacagcgggaagatccttgcatacgcgccagtggtagtggatcaactcatcgtacaatccagaggaagcaccgaggaaagtagacacacggccgtactctttgatcgtcgagcggaattgagggatgagtggggattcgcggaagtgcgtgttcagcacgcggaaggcgatcaggagggtcttcgggtatagagctactacgacgggggcgactgggacaacggctgggacgcggaggggtcctgatggccgggtgggtggttcgggctggtctgctgtgctcacactctccgggtctgaagcctccacgagagatttctcgtccaggtggcgcagcatggagaagatgcgctctttgcagacctcccacacgcccagatcgcccttgccttcctcgatagcttggaaaagtgcgaattcgatatgctcggattctgcttgcacgacgatctctatcgcccgccgcaggctgacggttacttcggcggcggtggctgtggcgggctcggtatagcccagatcgcggagcttgattcgctttggaccttggttctctgctgggacttgttcttccgtttctgacttctctggtcgtcggtaagaggagtagtcgtccttcgcctgctgcttggctttcgtatctgccctctttcgtcttgggtcttttagcagattgtcaaacaccgacatgagctctgccatttcggctttcttctcctcgctcattggtgtcgatgagctcgcctcggtagtttccccatcgtgtttgaatccaagctgctctaagagtcctccgaatatcaatttctcctggctggtgatcttcggtgctatcttcgttgtcttcttcacgacagacggtctgaggctaggcctttcagatacagatgctgcgcgtttctgcagatagcttcgtcgcggtttcggagctgcctcggtctttgagctgttggtaattggttgttcagaagcattctgacttgtgttatcctccgctaatgatttgttttctgttgcatcattggcctcggcattgttctgggtagaaaaagagcgcggaaaacgacgattgaattggttccgagccgcggatgagagtggtgtaagtgtgcgtgtttgatataggaaaggtgccgtggaattgcttcttgagagaaggcatagccggttgatatttgtcgccatagctgcgtccttaattgcgcagccttgttcttgcacttcttagagtaaatccaacctggagtaactcttacttcttctctttcacctttcaactttgcaacttcactctaaaaaaagaaaaacaaaagatcactttttctttaaagagcacggactccggtgatcaacttccctcaaagtcacgtgatgtcgtgtaactggcccacgcgtttccaagacgtgcctcgcaccccagaggcgcaaaccgcacgcgaacccggtacgcctgagattcccgaaacgaacatgtcggggaaaactgagttgtcagacttcgaacagcagcgcttagcaaatattgccgagcgcgacgcgctgttgaagaaactcactctcgaatcgcaatcctcgggactcttcgcaagccctaagaatccccgcagcaatggcgtgaaaccgaaaaagcgcgcagctcctaaagtgaagactgaggaagttatcacaccgcggcgtacgtcctcacgccttaagggcattgcggccgaaagtgaagtagcaaagcgcaaggccgacgacgaatatgaggcgatgcgcgaagcagatagactcaagaggatgcgccggacagactcattcagtcaggcagatatgtttatttctgggcagaagcttagtcctgatagcctgatcggcgtggatgttatcaccaagggtgttgcgaagccctatgagaggaccttcgggaaagatgaaattgagaagacgacggacaaagacctgaaggctcttcggaaggagatgaatgggttgaaattgtgggagtcttgggatcctcaacgtaatcactatactctccacccacaagctaccattctgacacattttcgatcattacagggatcaagatcaccccggagcgtgtgtatagcatggtctttcacccatccgaatccaaacctcttatattcgcgggtgacaaactgggtcatctgggcatgttggatgcttcgcaggaaaagcctaccccgggtgaagacgacgacgaggatgactttgatccagatccagtcctaaccacattgaagccacatactcggaccattagcgcaatgatggtcaacccctcaaagccgacacatctgtatacggcaagttacgacagctcgattcgatcactggacttggagaaaatggtctcttcagagacctatgctcccgaatctactactattgacgaggcactctccggagtagacatggcccccaatgaccctaacacattgtactggactacactccagggtggattcgggcgatacgatacgcgaacgccgcggaaagataccaatgtgtcaaactgggaactctctgagaagaagatcgggggcttcacactgtgtcccacccagcccaactacttcgccacggccagtctagatcgattcctgagactgtgggatctgcgcaagctgtcgccggaggatcccactcctgttgccgaggatgaaagccggctgtctgtttcccacgcagccttcaattctgctgggcagattgccacctcgtcctacgacgacacattgaagatatacgatgtgggcgcgaagggtctcttttcgtggaagcagggccacacactttcagcaaaggagtttaagccagacacagttgtccgccacaactgccagactggccgctgggttactatgtatgcttatccctctctttcctttttcgcatcccttttcgttctgccaagtatcattacctaactttgttcttctagtctccgccctcaatggcaactgaacccgcaatcttccatccagcgcttctgtatcggcaacatgaaccgttttgtcgatgtgtacagcagcaatggggatcagcttgcacagcttggtggagatgggatcacggctgttcctgccgtggctgtattccaccgtagcaagaactgggttgctggtggcaccgctagtggcaagctctgcttgtggaagtgatatgaatcttcgctcatcttctttatgcagtgtgaggctgtataggttatttgctaattattttactgtgttttgagcttcctttgaagattcggtgttgtaggaggcgtgttgcctaggattttgtttatcccctgctgtgttgttatgacgacagacttgctattgttttccaatgtacagagaccttgatctgttatttctatctaataacagtcacaagcttacaaaaatgagaacaccaagccattccatctattggaaaaacataaaaatagtaataggtatttacacgatggccaccatctccagaggaatccgaacacacaagaaaaagacccagatgattcctcagaacgaccaaaaagagaaaaacacaagagcctcagccgagttcaaaatcagatcgtgttctttttagctctctttgtttttatcttagagctagactggaggagacgtgtataagggagggcgggaccatgaaacacacaatcaaaagaaggaatgggtatcaacaccatgacacatgctttaggggagaacatagacatatagatgatcaggcagaacggaactcgaggcaaaagatggggataaaagaggaacgttggaatcatgagcaatcataagcacatgggaaagagataggcgagaaagaacaaagtcaaaaacacgtaagaatgaaaggagattgcatgggcaggcattggtgcattaagattcattgcgtagatcctcgtgcgagtggttgttttgattctggtcacgttccttagccttgcgtcgggagggagcaggaacaaagtcgaagaagcggtacttgctcgaggaggaggactctttcgtgacgctggccctgcgtgccttggcagtatcagagtactcgagagagtaggtcgaggagttcttcgagcttccggtactgtcacgtgggtcagaccagcgtgggatggcaaatggaatgcggctttgatcccaggtcgccgatgacgagcttggaggagtgtcatcctcgggatcgggaacctggtcagtggagtggcgagctggaggacgcgtagggaagtagccagtcgaattgcgatggctgcttggggcggtaccaactgccgtttctggcgctggagtgccgggtttgcttaagctctcgtcgtagaaggtaacaggtcgctccatcgaatcgaccagtgcttcccatttgatctcaaggtttccactcggccgttctgcttgctcggctcgtttgagacattcctcggtgcgtgcccgcaggcgaagggcttctttttggaacttggcaaggctgacgtccagctcggtcaattcgttgagtcgttccggggagacatcaagccagactcgtatcaagttcgcaaaggagcgggcatggtcaatgagaaatggaaggctagggaatccctcacgcgatgtggggggcaaccgcccaaggatttggataggggtggtgtaggagggtgtgacgatggggactggtcgatcggcgggaatcgcacaaaccgaatcaataaagtctttgaattccgtgcgatgaccaacgaggaatttgttcatcggttccatccaaggttctttattgccgaatgttgtcatattggccagaccttgcaaagctttggcaatgagggtcaaagtgcgctgtgcacgaggacgagggtgatctggagatgattagcaaaaggacaagtcaaggtacgagcgtagttccatacctttcaaaagcccgaacaatttcgggttcagaatagccgggcagaagaagcgtaggaagaggaaaccagaaacactactgtacgtcacggaccggaggaagtcaccataacgatcgtctgcacacgccctgacatgccggaagatgcgtcgcagttctgggggacacctcgacgcagatcccgcaatggatttccacacgcttgtggtgagagctgtaaggtttcgccagttgcgttcaagatcctcctggcgtggaattcgagacggatcaacttcgcattccggatcgctctcatcaatatcgcgtagtcgttccgcgacagtctcctccaagtactgtttgcccaaacgacgcatgtgaagatcgagggccttagttagaagcgagtttccacggaacaagaggttagcctccacagtggccgtccttcccatgtctctgacaaggacctcgcgctcttgactagtctcctgtgggttggtcgaatgaatcctcgttgtatacctcagccggttggtggtggattctttgtgaaccccatcgatttcatcttcaaccaaggctgagatccattccaccgttgaccctgagacctgataaatgttcagaagcatctcggccaggtgatttagctccgatgacatcagttgtgccatgttgattgtcaggccattagtgaaggagtggagaagttccgacattgccgagtactcatcggacatcaagacgacagtttcctccatccgtgctctcatgaacatctcgccaattgcctgatcttgattatccaggataggccaccacttttctatatccacgccggcatccaattcttcgagtcgcaggtctacccgtccgaagacaatatcatttgcggaaatttcaatttcatccagcatgttcaccgcattcacgtcttggttgggtgcgtatgttccatgcgcgataagtgtccagtccctctgtgtcgggttgagggttttaacgaggatagaggcttgggatagtactggcggtagatcagtgaagataaaatcttctcgccagaaaggattcatggtgcgatacttgacagcagtcttgccacgaatttccccatcgaggagcacctccgtgtaatagtcgctgaccttcgagcttggaacaggctgaccatgtgatcttgatgcctttcggcttcggggagtgtcctcctctatggggcgaaacagcttcgcctccacaattttcaagctcaagaatctttcaatccggaacatgtcttttgtcactgctacttcgtttgcctcgctttctggttttcgatcccctcccttagacaccggaccatagagctctgggattgtaaatgcacggagaagtacaaaccaaacctcaaagagaacacggttttcgagagcgaggtatataggccgcacgttggaatcggataccgggtgtgctgtatattgaggatagatggcaatgcaaaactcatcatccaacaccgatgagttcagctgctgaatagcacagcgtgataactgggacaactgcacatatgctaagagagcgacgtcggactctgtgtagagcttgaaaaagccgttttcttgtagtgtgcagctcaccttctgccacgaggaagaaagagcccttgattgtcggtacgtagatacgcgacgtccggacgacggcattgcaccggcagcagacggtttgtcccatagaagcatcttaccaactttgatgatagttgcatccttttgtgatgcggtttccgagttgcgtcgacgttcggggatccgtcggtctccaatcacaacctcttgaggctttgtcatcttgttctgaacgcccttgggccgaattggttgccaacaaagtagagctgcaagccaagaatcgaaggtttcgttcacgtgcggtcgtagttgtatcccaagccccgaggtaaatgtgtgaacgctcagataggtgcactggagctcagggtcccacaatgtccgaactcgacaaccacgtagatcaggaattaatgttttggccaatgccggctctcccttggcttggtaaatgagacttccagtcgcgacgttgatagcgcagtatccggatgtccaggcagtggtcgaggctgttcgaaaagatagaatgccatgcattctaccgcaggtggtcttcatcagctgcaggatcttggtgccttccgcactcgagaggggcgcgccaaatgaatcttgattttgtgctccaccggcgaccagacctgcaactttgctcagtcgatggcgagggacggtctggctgttgtattttggggactcaattgacggaaaaccgatggaagaagatggatcgtcgggcactttcgattgagagggactggccgtgttaattgacccaacgcgagttcgagttttgttggggttgacgtcgctgtgctcgtcagccgctgttgtccttgatcgcgcccgttgactccttgcttccagcggagaatcttcttcgcctgctgcagatgaatgtttgttgaaatcccgacgacgttctggttcgacgggccgtgatcgcacggtgtttcgagctgaagacaaagcgccgcccgtgaggtgctccggttcggatgagggggaattgttgacagagggttgtgactctggcgtcacagttcgaatggtagtttctcggaaactgtcgggatagaccataccatgccggtccctagatgaagacttcttgctagcacgccgttccactggacgactgtataacgcttggtgcatcgagcttcgcttgtacgcgttcggattctcgggctccatctcgttctgttataggacagccccttcgacaggcgatagagacaaaccgaaaatgaaacccgtcaatatgttaaaagaggagagacggacaggttcactcccttgtcgcacccaacacaacctccctcaaaacaatcggtgaaagaagagcttgttggcaactgacgtatgcggcacggctgcgcttgtataattgaggatcgcttttgcccaggagattgttatgagacaacatggagtccggtgagaggttgggtattggggtcgcacattcggtcgaggcgccgggagaggggaagtagtaatgggaggctaggacaaaggaggcgcgggtcaccgtcgtttgtctgagagatgcaggagaatctaacgaatgcgctaagcgtccaatggtccggccagtcgatagcgagggtgtcgctgtcagtgttagtggtctgaagaagcggcccgatagaaattggtagttgagaagggcgtgaagtgatatcattattagagggaggggagggggtatggggtagggtatatgggagtaaagacatgcgcacataccttcatcagtcccttttgaaattgggaaggttttgcttatgctctttaggagaggtgtgcgtgtgtgcgcatagaggtgtttttgcggattccagcagatgtaggccgctttgggacgggggcagaatgagggggaaggtcttcaaaggaaaatatttcccattaatgaagaatcaagttgaaattgcaatgggaagatccggtaaagatcgccaaaagccagagagagagaaagagagggagagggagaggggaggggggaggggaggagagaaagaagtggatagcggagctgaatctgtatatgggaaaaataacgaaataatgaggaatggcaacgctttctgacccttttgcctctatcttagtctctagagcttgctgcaagtctattattggctatatccgtcaatttatacttccccccatgttttaggctacctggatgacagcgcaacgtggatgggcacgttctatatacatcctaatcatccccagagcaagtgagcttggactatttacctcgatactccgtagatgtagatccaacccccagcctttcagcttcagtttaagcctttaaccgaagataccgagtctatattgtaatatcaccggagcaagggaagaagtaaatagcgggttgaggtgaagatcaatagctttcggatttttcgaaaatggtcctaaactgccgagagattttctagaagtcgggataactgcatggcgtctttctgctgactcgcactggctgcggatcaccgggctagtggaaatgggccctgaagtcttgagtcatgacggtcatgcttgagatattgatccctttgtggccgtgcatcgtactagtatattatattataaatgcatggattcatatgctcctgacgatggcaaccttctccttgtatttggattaactctatatgattctaaatgaatgtttctatacggtctgctctgcaatatgcaaattcaaacgtggtgtccggggcgcagatcctggccccaactatggtacatatgcacctaggctaacaccttgacgcagtaggtacttttgattcgctctagttacttatacactaatagagacattaataatgtcgtagccggggaggggagtctctactaaaacaggttgagggaaatctccgaaagtggagtcaattgttagtctgtagcggttaggaaatgagatcttcagccaggattatatactggagtcacacagaactaagttcagattgagccgtagagagatgataaatatgagcatgtaagcatataagcatatctgattttgaagtattcaacacaaaaaatagcaagtcgcaatttcaaagtgcttcttactcagtacggtacggtacccgctcataaccatcgtagatgagtgtattgtggaactgtggatcaatcctaaattgttgtactttaccagtgggttctggaagtcttccatgcacgcatttaataacgtcggccagggaagcgattggacgacggggcactgcggattcgagacgactcaagaatgccggagacaagcgtaggcagtaagatggacttttaccgacggtactcatagcttggcatgccgcagctagtgagtactagtactagtactatatggtggacggaaacaggccgcatagcgtcctgttctagcagagctgtggggtgaatgtcgtaggaccgatagaggttcggagcgtgaattcattgtggagtccctccgatgttcgggaagatttattcaggtatgctccgggacaatcttgtacgaggcttgaatatctgctccgctcgagatagttgtagaccctctaagctagtgaggttgcagcaggattcgaaatcaataagataattttccgtcaggagttatgcaaagaaatccattctagcccaaatctatggagctggcgattgaataattatagagtcaatgagtgagaagaatatggaggtagaatatggataggttagtactgatggaggcaaagtaaattccggtatccatatcacctgtggagataagataaggtccacaagggcccaatcacgtgatacacacacatgactttagattgctgcctgaggccatataccccttctttatgtcatcatagctatcgggaggtctggggaatgatcatggctcctggtgactgttatcacgaggactaaatcaaaggctactattttataagctggtacagtcaccttaattagggtgcatgctcatttgaaacacgattacgttcagtctgttgtattgatagtgatccccatttatccgcatttcaagcgccgctggatggcatttcattaccacgatcactggcttctgaagctgttgccatgaatggtctgactatagccttagtctgattcaaaatgatgtcctctaacatattatcacggttcctacctccaacgggctcacgatcggtctatgagaccattcgccaacatgacgtcgggtccgaatactctgatctcgaagaacgtgcgggcttggtcatagaagaccaacaggaacaatttagtgaccgggaactggaggatgcactagcggatgcacaggatagtgaaataatcagccccagcactgcattgcttgggcaggcacggtcgggcaaagcacctgaagagcgagcttctccatctggcacccgccgtcgcaagtcgtcccggcctcggtggatgccacaagaatcaccactcggatatgagctcgatgatcatgatgaggacgtccctcagtctctgctggtggaaggtcatcacgaagatctgaaatcacagttacctcctcctccccgacttcatggtcgtccggaccgacgaagaacccctagccctggtccatcctcacaacacaccggaacacgttggaatgaacaagcagcccatcaaacactgcccagtgaaagcggtcatccaatagggagatggttcaccggccaacaccctggtcttgccaatgttgaccccaagaagaaggcaatgtggcggtgggcgaacgtcgaggatctggataacttcttaaaggacgtctacatatacttcttagggaacggaatttggtctattctgctgactcgggtgctgaacctcttgtaagttcacgatgaaaccctttccaaagcatcctaggagaagctgacagtacacacaggacatttgcattcgttgttggtttctctacattcttaaccaactgcattgattattctaaggttcggcgaagtaaaactctggatgacatcctcgtgcctcaatgtacagcaaatatgtccgggtcgtccacatttttgctgtggctttttagcttcttctggattgggaagcttttccagtacctactagacattcgcaggctcaaacacctgcatgacttctatttctaccttctcggcgtctcggatgccgaggtgcagacgatttcatggcaagaagtggtcagtcgactgatggcgttgagagattcgaatccatctactgcggctgcggtttctgccaaacatcgaagattcctgggcagccagtcaaagcagagaatggacgctcacgacattgccaaccgcctaatgcgcaaggagaactacatgatcgcattagtgaacaaggatattctggaccttactctccctatcccgttcctcaaaaatcgacaactcttctcccgaaccatggaatggaatctcaatctttgtgtcatggactatgtctttaatgagcaaggccaactgcgaaccctgttcctcaaggacacgcatcggagagccctgagtgatggcttacgtcggcgctttattttcgctggcgtcatgaatattttcgtagcgccctttattgtggtctattttatgatgcactacttcttccggtacttcaatgagttcaagaagaatccgggccaaatcggttcccgtcaatatacacctatggcggagtggaaattccgcgagttcaatgagctttggcatctctttgagcgtcgaatcaatatgtcttatccattcgctagtcgctatgtggaccaatttcccaaggataagactattcaagtggcacggttcgttgctttcatctctggcgctcttgcctcggtgttggcccttgcctcggtgatagacccggagctcttccttggatttgaaattactcctgaccggactgtgctattctatcttggtattttcggtacagtctgggcctttgcgcgagggctggcacccgaagagaccgatgtcttcgaccccgagtatgcacttctcgagctgatcgattttactcattacttcccgtccggatggaaggggcgtttgcatagcgacgacgtgcggaaagaatttgcaatcctctatcaaatgaaagttgtgatattcttagaggagatcttgagcatgattttcactcctttcgtcctatggttcagcttgcccaagtgcagtgaccgcctcattgacttcttccgggagttcaccgtgcacgtcgacggggtaggctatctctgctcttttgccgtattcgacttcaagaagggcacaaatgtgctttcccaagccgggcccgggcgtcgagaccctggcaaacaggacctgcgcactgattacttctcaactaaagatggcaagatgctagcttcctactatggcttcttggacaactacggtaccactcatcaacctaacagccgacgacaattccacccaccgccaaccttgccaaccctcaactcacccactgcagccgagttcggtgctcttcctgatcgccctgaccatctccatgcacgcactgggccgaccgccggtgtgccatttggcgctcaatcaatgatgggagactctaaactaaggcaaatgggaggattcgatcaccgatctcctgctccatccatcctgcttgacccgcaccaccaaccctcaaccactgggttccgcgccgcccgaaccagcccccagcagcaccatcgctcccggctcggacacccgtctacggatactatcgacgacgaagaagaaccattatcccaagacggtcgtgaatcaacaatacggcagtcgggtgctcgtaccggtaattccagtgcaggtgcaggcactagtgacggtaacctcggcggttcttggcgcatgaacccactcagcaaggacgaggatgatcctgatgagggcgatgaaggtgaaaatatcgacgccattgctggtgggggcggtgttttggggttgattcagcagttccagaaagttaataccgaaggcagacggacggggatttagatattcatctcctgtgccacttcttggtggtaggcttacttagaaagctcgttgcttatatgcttcagacacgatatatgaccatttcatgcagcgtttagtctttcattgctctatcatccatttgcctgtcatgatgtcagcagtatgtttgtctactaactagtcctaagtcacatgcacccatgaacatcaggcaccttaggaatctgtgtaagcgcccaaataccgatacacctctgtgcccctcctttccctccgccatccctccatccctccatcgctcttgatgtgccttcctctttgaccttgcccaccgacaaaccacattcatatccacagaaacaacctagcatcaacaagatgctcgactgtatcggaggctgtatctttgggagactggcgaacgagccacgtcctcccaccgacccccgatcccctgagtccattgcctctgccattgtcaccacaatactcaatgccgacgaaccatactcgctcgacaaacaactgaacgaggaactttccaccgaaagttggaccgacgccatagcacaagctatcctccacggtctagagaatgcaatcaattccggcgcagacatggcgaaagccgcctctgatgctgcggcccagagcagaaacgctgctgtcggctttgcgacagaccatcctatgtacactacgctgattgcattgggcattctggccttgttgacaccttgggctcttgaaatccttgggtttggggagttgggtccaattgagggctcgtttgcagctgggtggcagagatcatttgctggatatgtgcctaagaatgctttgtttggctatttccagaagctgggtatgaaatggcgttggatttagatctgtctgagtatggtcctcctgatggaagttgagttcacttcgtattggcggctggaagttcgaggtttaccgtgcccaatattttactctctgtcaatttcaatcggttcctgaagaaacaaggtcgagcaatgccaatgaaccctactcctactcgctagacaaacaactgaacgagaaactttccactgatatcctccatggcttagagaatgcgaccaaatccggtgtagacatggagagagctgcgtctgatgctgcagctcaaagtagaaacaccgcatcggctttgcaaaataccatcctctcgaggatatacatcaccgataataagaggggtatccactgacgatgattatacctaattgggatatggttagcaacaatatactgtaattgactcaacttcacgtgttggagcttttggtgttaaaaattgagtaagtagtacttatttgtcttttcttttcattttatttacaaattttccatatgtatgtgctgtatatagtatgtgccatgcgaatttcccgatcggggtgacgctcagtaagcaagcttaatgattacgtaatactcagggggtgcccagtactaaagcggaaagggaaatccaacttgcttgaccaaagatccggtgtattgtatgactatgtatgtgactacggagtaccggagtacggagtacatcgttaactatagaataagacatgacaggagtgacttatttgccacgtgccatcctttagggtctagaaccgcactcgctatacaggataggctcctcgctcaacttaggttttagggacaaaacctagcttagggaagcattcagctagacctactactgacttcatgtacctcactagttcactaggtcaatgtaacataacctactagtcgttaccccgacctagtgacctgatgacccggcgaaccccctatttatacttgagtactccgtattgtgtaggatatatcttccggtccagattgctgtcgatgctcccatgcaatcataatcgcgcggattattatgtgtctttcggctgcaggggttattagcacaccaatgggagatcagccatgtggaccacctttgtgatggaggccgcgctgagacaagctagcggaagagtcgattgatgataggccaacatgagaaacccttacgggttgcatgcatttaatccagtgacggtccggaatctggggccaatggtcaacgttgaacagcctcgttattttattcgccctaaaagatgccgtctgggctgcaatctccactatgtcttgaggcccaaaaaccgcagttctccggggcattgaggaattgagagcatttcatcgggaaagatctctttgtacaagagaaattgaagttggaaaaaacataaaggaaagatataacatggaaataagagttgaagaaaagttgaagatgtcaaagaacagaaagaaccaaaatagaacggggaggctctcgtgtggatctttttgtttacttgtggagtctcgtgatttcatctggacttggctaatttccttggtgtcttcctttctccttcctttttttttttagtatttttttctcgaaacgaatatacctagaaggtgacagctcgcgatgtttcgagctcgccgataccgagttctggtcatattcgcggcggctgtcgtcttcacattcttccactttgcgcggtcacgcgattggagctatacagtgattgaagagtctagcgttcactcacccgatgctgcccatccgcaaaacccggccgttgctgctgccattgaggagagtcgaaaccgcgtgcttcccgaccccaatcgcggctccacctcctccccaccacagacagagaagatcatctcgcccgtgggccccaatagcggctcaaaggacaacaaccggtttaaagatccctccgacactccaccagtgaagactcccatcaagagtgatccgaaggactctgcgaaggactctgcgaaggactctgcgaaggaaccagcgaaggtgggaggcaccgacagcttgccaccaccggcaacggagaataccaatagcgtaaatgatgaggaaattgataatggagggacaggcagaatggcagcggagcgccctgaacctggcattccaacggccaagtggaagaagttccccgaacggttccccgtccctgcagaggaggtgatcaagctgccaaagggagagacgaagaaaattcccaagctgcaagcgaagttcaaggatgagtcgagctccggcaagcaagagcgcctacaacgccttagcactatcaaggccgagttcacgcatgcctggcgaggctataagaagattgcgatgggacatgacgaagtcaagcctctgtcgaaggagtttgaagacccattcaacggctggggagcgacattggtcgattccctcgattctctctggattatgcagttgaaagatgaattctccgaggctttggatctgatcaaaaacattgatttcaaaacgtcactgagagcagatattccgatgtttgagacaaccatccgctaccttggaggtcttttgggtgcctatgacatttctggtcatcgatacccagtgcttttggagaaagcagaggagcttgctgaggttctcattggtgcctttgacacacccaaccgcatgccgcacctttactatcgctgggccccgtaagtcttgtcacaaattcttcctgatcatctagatgacgactaaccaacctttctcagcgagtatgcttcgaagccgcatcgggcgtcttcccgagccggcctagctgaaattgggtcgctttccttggagtttacccgtttggctcaactgaccaagcgggacaaatactatgatgcgatagcccggatcaccaacgaattggagaaaatccaagatttaactagcatcccgggactgtggcctctacgggtcaatgcacagggatgttccaagtactccaagaacacacctccgcgtgatagtagccctacacccgagcaaaaccttgctagtgcaaccgagactaccactacggtgacccacaagacttacgctgcaccaacagaccttgagagctatttgaagctcatcccacgagacacaagccctgacatcgaaagatatgcccagcctgccaatgatacgcaagctgccagtgagcctcgcattcagtcacgcgagcaaaatacaccagcagataaatgcaatggcggcttgatacttccccattcaccccgcgataacgggtacgccatgggaggaatggctgactcgacctacgaatacctgcccaaggaatatctgctactgggtggcatgaacgagcaatacatgaatatgtataaaaaggcagccgctgcggcccgcaagaatcttctcttccaacccatggtgaaaggtggacgtgatattcggttcatggcctccactagtccaatgacacctggaaagattgcagagctcactccatccgatcttgaatacgaaggcgctcacttgacgtgtttcgtcggcggcatgttcgccataggagccaaggccttcggcatcgatgctgatctggaacttgcagccaaactgacggacggctgtgtttgggcttacgagtcgacacaaaccggagtgatgcctgagcgcttccgccttttgccctgtgagaaaggctcggcatgtgagtgggatcaagcccgctttgacattggtgtggcacgctactctcgcatagaccccggggcaggacattcgttccgcgacggtgagagcagctacgaacagcgcgtgaatttgatctcgcacgatccaccccaaggatcttcgagcgggtcggttcccatccccatgccgggctcattaaacccccacgatagcgatgtgttgtccaagcgagatggactcgcattaggaaaacgtgcggaagcaattgctcctgcttcaagcccgagccctacttccagtggaaccgaactggaggaccgggatgcacctcgttcgtcttcgtcgcccgcttcgcctcacatcgccgaagtcggcaaagaccacctccccgcaggcatgatcagtatcccgtcaccgaaatactaccttcggcccgaggcgatcgagtcagtatttatcatgtaccgtctgactggcgacgaatcctggcgtcacaaagggtggaagatgttcgaggctatttcgaagtatacccgaacggagctagccaacgcggccatccacgatgtcacagcccagaaaccgatccacaaggatacgatggagtctttctggctatctgagacattgaagtatttctatcttttgttcagcgaccctactgtcgtggacttggataaatatgttctgtaagtgactgacgtagcctgtaaacaaactctgaccaagaactgactttttacaggaataccgaagcgcatccattcctgcgcccacttgcataattatgttttacattttgataccaatgaaagttctttgttctataacacataatctcccatagacctcgtaataacgtacaagataatgtgtcccttagggttggcccgtagtgggactcttgaattccccccaatcccccgcccttcaactctctccaactcttcaagccggcacataaaccggcatgagctgtctggtgggaaatggagcctgaggtctcggagactgagttctggactggtacgttgttctcagcccactattttctcctttcaagataatgcgacatgacaattgaccggttctcgcagaacttcaagcgatcgtctccaagccctgtgactccgaagaccagatcgacgacgctctcagagcctatctcgatctagcaacccaacacaaaggtgaatggcacttcgacctccgagaagcgatgttaaacccaacgacactccgaaaccacgtccgctcccaactttccttccactacgactaacacacgtgcccttccctagatgaatacctccggtcggaaacagatttctcacgctgttcctacaagctattcacgtcgagtatattcgccacacatgcggactacgtgcgacgacagattctctacggtctgctgcaggacgacgacccggataccctccacttcattgcgtcattcatcctctttgacggacgacagaatgaagttgtgcttcagatgctaaatgaggagggcgcgtttgcgcgtctcctcgagctcatacaggcgatgcggagggcggatctggacggcgacgcgggtcttcatcgtttgttgatggaccttgtgtatgagatgtcgaggatacaaagggtcaaaattgaagacttgggtgcgttttggatacacgtgtgcctgctgctggtagctgattatggggcttgtgtgcagttctcgtggatgacgatttcatccgctgtctctttgatatcatcgaagatctctcttacgatgttaccgatccgtatcattaccccgtgatccgggtgctggtgagtactttcttcaggatcattttggttagaacgggattgacaaattgaccagctggttctgaatgagcaattcatgatctcggctcacaacccggtggacggccggccctctggtcatttgaccaacaaggtcatcaagatcctatcagtatatggtgggatgtataagacattcggggagaacatcattcttcttatcaaccgtgaaggtaacggatcctcctattcaataaaggcaatgactgacaatatgcagccgagacgtcccttcaattgcttacattgaagcttctctatctcatatttaccacccctagcacatatgaatacttcttcacgaacgatctacacgttctggtggatatattgatccggaacttgctcgatctacccgaggaggccgctgctctgaggcatacttacctgcgtgttctttacccgcttctagctcatacacaactacgatacccgccgcactacaagcgtgatggacttcgagggctactcagcgtccttgtccggggacaagtctcatatgggaacgacgcagaacacgagaaaatactgcattttgaagaggtcgatgaaacaacccgtcgacttgtcgcccggtgtgcgacagtggattggctacgtaatgttgaacagcccgacgccgcagaaacgcaagatacccccactcaagagacaacaactacaattgagactgtcctagaagaaggcgagcggcatgcgtcacctgtagatatgggcgaaccactcgatatttctcacacactctcacggtcaagcacagtcgctagctcacctggtaccgcatcaccaacgcgaacggactcgtatagttcgtataatacacctgggagtcggaaacacagcttaatcaaccggctcggcatgaacctagagcccgcatctgcatcttcactgagcgttcaggccgttgcagcacaccacgaaaaaccaggcataatcacccccagccgcaaagacggagtccctgtcgccgctctcagtgacgagacgccaataatccgaccaccaaaggtcaagccagaaccaccgaaatctcgacgctggcgcgggcgccgtatggccgtggatgaagacgagcaccactctgccggcacaagcagtgacaggaacaccatccccgaaggcatcgaagtcagtcccaccactgttatcactcccagcacaccaccaccaccacagacacatagcagtgatcgcgactcgggctcaggttccactctcacaacttcaggtccaccgcgacgatctgtatcaaaccctcccccggccctcccgccaccacgccgttccagccataacacaccatcctcaagtcaccaccggcccgtcccagcagcgggaacaagccgacatggtcaggctccacttccgccaaaagcgcgccgttggggacgtggcaaaccccagcatggacagagtgactcggtcgagagcggggccagcagtgttagtccatcgaaggagcgtgaaactgctgaaaataccaccgtgcttgctcagcaagagctgtcacagtcaccagagcgcagcgttctttcggatccgttctcgccaaagtctcccacactggtgatttcgccgatcgaggttactgcggacaagacagatatcccagccgacggtgctggcgacgaccatgtgcatctcagtgtagaggaggcggtgcagaatgtttccctgcagtgagcgttacttctcgatctgtttaattcctttctttttcattattagatatactttttggctcccttcaggttgttttttttggcatcaagcgcggctgttcgggtgaacagattgggacatggtaggctatgtctctagttattttgcatggcatggatatttgcgaggacgtcagcgaggaccggatcctagaataacacaatagagtctatttgctgacaagaatggagtagtttacaatagtaacatagttggtaaaagtacaatctatctatgtcccaccaagcaaagcttgcctcggtgaatgacttaagtatgggcctagccatatatactaagaatgaagacgcttaaatcttcaacccccagcttcgccccagcccaatagcagtattccacccaaacccagcacactgtccaatgccggtaatcttatcagcaagcgccttccgatcatcaaagcgacgctctacgaacgccgccgtctccacgagatccggcgtcgggtcacgggtcatgacaacctcagcactggcatagatagccgacacggccagacgacgcgtgtaccaagtagcatcaacagtgtcatcaccagaaagagtaaggatatccgaagcaagggcatgcagttccgtaagagagagggggatattagccaagagcgacatttgcgcgagagcctagatatagacatagattagcatcccaatccaattctaaatcatgtccttcttgatatatcccaggaaggaagggataagaaaggaaaaaaactcacatcctgccaaacatctctaacatccgcattcatcctcaacctctccaaaagcagtccccgcacccgctcctcaacagaaagctcatggacatccttccctttctccgccgcaatgcgccggaataacccgccctcctcgaccttcccgcgcagcagaccccgacgactagcaagccagaagaggatgaggtcgaattcgccgcgggggagcagctgcaccgagacgtcgaggaagccggcgtcccgcgcgccgagggttagtgccgtggctgagaagccgtgtgtggggacgtgggcgagcgcggaggttaggattgccgtttgggagtttgtgtatgagtggtctgggagccgggcgtggaggtctgagtggtagcttcggtggcggaattgtcggggttggtttgttcggggtgtgagttgcgtggtgcgggtgcttggtgtggtttggagagttgttgtgcttagtcctcgggtttggcggagggattgggccacggagggggcgaggacccttttggggagagcgcgggcgaggtaggacatggtttgagtgtgcttgggtggtgcaatggggagatacggagtagatgtgattgttggagatggattgggttggtccgtgcgttgtagtataagatcgagatggatctggtgtattgcagaatctacatatgtatagtattatacttgatgtctgtctattttgattgctatatatgtgtgtagactggacggtatacttgatttatatcgagctaatgattgagtctgattctcggcttcagacatatgtacattttgtatgggatatacatacagaagatacaagatgaaacttccgcagaccatctttcaaccataatattattgaacaacatcaaagtgggatcataactatatactaatagtatacctgtgatagcaatgagtccaactgtagcagacattgtacgtagattaagtatttagatctgccgaggacttgaatgcagcaaagcaaaccgaggagatacctcgaaatgaccaccgtacgtgacccagaaatatatatgtaaaccagaaaagatacgatgaaagaaagcgaaggcacataaacgaacggcgacaaggacaagtacgaccacgatggatacgaaagcccgggccgttagaccaactgctaagatacatacgattttcaaaggataaagactagcaaacctacgaaacacaagtggaagaagatgctcattccattttggaaacaattgatcagcccaaataggcactcgaaacccattttgcgaggacgaagccacgaaagaactgaaatgggaataagggaatcatgaacaagacattgcgaaaaaaaagccagacgcccccctgtcaaagaaagtgactaggtaaaacaaggacgaaagtgctttacatgatctggtcctgggtcagaccgacggtcgactcttggccttccatcatctcttcgggacctgggccagcgttcatgtacttcacgaaggtgatgcccaggggacgaccaccgtactggtagccggagaatttagctgtgagggaagaatattagtatatggattggcagtcacgatacaaatgcaacgtaccaattgcagtttcagcagtatcagcggtgtcaaattgaaccacaccagtaccgcgggagcggccgttaggctcgtactggatttcagcgcgctcgactttaccgatggtggagaacagatcaaccaggtcatcattacaagtagaccagggcaactaatcgaagttagcattccatatgttgcccatcgcgcatcccaaaactcacgttgcgaacatagatgacagcgctcttgtcaccgttggaagtggcataatcagtgaaagggttggggggtccggagggaacaggaggagcaccaccgtgctcaaacccaccggcaccggggaaaccaccgtggctaccaggggagccaccgaagccgccgcgtccagcgaagccaccgccaaagcctccgcgaccaccgaagcctccacgacccataggaccgccaaagccgccacgaccgccaaagccaccaccaaagccgccacgaccaccgaagccggggccaccaccagcgaaccggtcttcgcgaacttcaaggggacgaccctgccaatcgtatccgttgaactgcgcaatggcgttgcgcgcatcatcaggagactcaaaagcaacgataccggagcccttggggcgtccggtagggtcggtgtgcacatcggcacggatcacggcaccttgctgggctgtaatacggagtcccggtcaattcaccttacactagaaaaaagtaggaatccaagtccaaaaatccgcacttacctgctgaacggaacagatccttcaagtcttgccagccaacgttgaaaggaagctataccgaacggtcaacaaagcctgcagaacttagcataacgggggtaaaaagaggggacaaacgtttgagacataaatttggcggccaccgccaccagcaccaccctgggggcctccgaagccaccaccaccgaatccacctcgggcaccggggccgaaatcaccgcgtgggggaccaccaacgaaacggggctcggattcacggtcctggggaaaagtcagtactaatcgcaacaccaacaccatggaatctttgaagacatacctcacgaacataaacaaggcgacccatcaggctctggttgctgagcgtattcacggcgttttgtgcttggtccctggttgcatattccacaatcctagtatacatgtcagctagaacgtcaatttgaagaaagacaagaaagtactcacccgcatccctacaaatcaggacagccaaggtccacccgtcaaccctatacaaaccacgagaaagatcggggaaatagaaggaactagcccctctacatataagcgcccaccttcgacattccattaggaagaagcaaaacatctgcaaagagaacttctccagctgtaaaaaacaaggcgcaaccaggattagcttcgatcgttccaaaaaatcaccaaattccaatgcgcaatccctgctcaccctgtctcataaaatccttaagatgatgccacttgacatcatacgaaaggttgccgacatagacccggcggtcttgctgggacgaatcgcgaacggtctgcatcatattctccttggcggcacgatcctcgaatcgagcgggggtatatccactgcgtccaccgaaaggagagcctgatcctgggggtccggttgctgctccggaagcactcaagggagatctggaacggcgttcgggacggcggtattcctcacggtcaccacggctgcgggagcgactccggggggagtacgaacgacgggcgcgtcgggggggactgcgagaagagcggcgacggggtgagcgagacctctcacgctggatctggtcagacatgaacaaaaagtagatagcaacggcggtcgcaaaagcggggcaatattataacgtataaaattgatgaaaaagagatgggacggagcaaaagacgtgttcagacggcagtcgctatgtggaagtcgcaactccgaggggggtcgtctgcggcgtgggtcatgtgaccactagctctgggggagtttgtctcggatacactgaggacctccggagtaggagcttagggccactggcacagggtgtttgtgcacacatcacaattaattttcagaatcacataacgtgatagtaatgtgcttccgccttgtggcccactgatctccagatccggcagatatctgatcaagtagacatggcggttcccacccccgcactgaccacacgccagcgatagcgacctctggtatagagctgcgagccatgcgcacatattggaatgttttgtagagtcgctggggaagaggaagacaaaaaggaacacggggctcgcggcaaacttacttggtatggtcgatagacgtcggctgggcggatgaggctgtcagcggagaatctcaagaaaccaaaggataggaagaaataggaaaaggagaagaagcggggggaaatgaaagtaccaggcgtcaaggttcaacgcttggggggggggagacctgagaaggtgattggatgaagggctgaaattgaccggggacccttcgagtgtaccaggcagatgagagtaacaaacgagtaatacaaagatacgaaaaagcagagtgtaataatccagaggacgcgcgagaacgtacccatgattgcgggctcgatggagcgccgagatacgttgtacaaagacgaacgatgggagacgggggaggtgaaggtagaagggagcggaagaagtgttgttctttggattccggatcctacaaagactcttggggaaatatcatggagagaagaaaatacagaattctgatatgtacttgaacacctcgggcaaaacccgtcaccgccccggcatatagttaggacctggtgtatacagctatggagatatcacgggggaaggaacgaagctgttagggggtaatgtgaatatcaacccgctctttcattcctaaagaaatatcacaaactagactatgacttatgtactgcctagatatgtacatcaatgtagctcctgaccatacagaccagccttatcgttcttatcgctcctctcacctcctgcgcaccaacatacaccattggacatctgcactcatgactggctgcacggcgtatttaagttactaaattgccacggcctgtaacctttcggaagactgtatccattcaactggaccatgctcaaaggttatacatggaaaagttatttgcactatttaagccttctctgccgtttacctatagaactttatcaggactactaagagaactactagaaaagactaccatcaagcaaactgaatcatgggctgcaaacacaaacaactcttcgtatgcatctttaataagaaaaagaccccctcacttcaataaaaaacctcaaacaataagtcctaccgggaaacaaaacgaaagaaatgggtgctgagtacccagccttgggaatcaagaatcaatccgcggaacaataaacaaagacaaaaacatccattgcgccacaccctgtctgtaaaacgaacgccgatgcagcatgacttttatgctgtgcgagagactgatccggtgtggaaacagtcctaacgagaggaccaaaacgccttggaacggacgagttgtgtaaggggcgaggagtgggacatgtacagataaaagagaacatcaaagagaaatagaagaaatggggtaagaaagatggaggaacaaatgtggagatgaagatagaaagggtggggaccctatgctgccacattggtacgaggataacggcctggcatcttcatatccagagcaatggagttgtctgtattggaacgcagcagaattggaaccttggctacgctgtctgattcgagaccttggtggataggaccattcccaagaccaacggtctggatcttaggaaggtcgagttcgtgatcatctaccgaagtaggattggtatggttcgtaaattcagtcgcattggtgttggtgggcaccgtagagacactctcccgacgatcaatctgggcaggagccgactgatcgcgacggttagagataccgacacccgagacggcagcaagggaagcctgatctccatcggaccggatatcgcggtcatcccgattcgggggttccagctgctggctctgcctcttcttagccactgccacggacggtccgatccaatcaccgtagtagctatcgtgctggttactatcagggcgagacctttcatcggtcccgtcgttggatctgtagctttggtaggagttgcgtccgtcgccgctacctactggtcgcaagctgtcattaaaggcactagacccatcggggagggacccagcagcccctaacatatctctgccagcggagctatccccgctggaaggtgacaggggcgcttggaggtttcggtcaagttggacgtcgctggggaacgcgcctccagcctggcgagaggaggtggggcggtcgtgagtcatgaccgcagactccgcggcgtatggagtgcgatcggcttcgtcgtcctccatcacctcattcaccgacctgccactcacgctgcggacatgctgccggacaaaggcgtttcgcgcctctcctgtcatgccaatcaagccttcgatatcttcataccaggacatcatggtctcgtgggattcggcgcggaagacccacgagtggcctcggtgcattgcgccagtctgtcgacccttcagcataaacttatgggagcttgagtcttcctgtgagtgggagccgagtttctgctctggaagatagagagacatgacaggcgtctgccatgctacacgatctgccgacttgaactcgtgaagatgtgttggcgacaacacatacctagagttgattagataatggcttcaaaccgcacggtaaagaagataggtactcaccagccaggagtataactcttgagatacttgctcttacgctccaacataccagctcggacttcagctgctgctggatgatccttgccagggtatgtgatgctttctacatcccggagaggaatccgaggatcgacaagttcttctgtgtcggcaacaaactggttccactcgaaatcttggggcatggagatcggacccgcctggagcttctcaacggtatcaagagcttcattggcttcgcgtcggaggatactagcgtacgcattgtatgccttctggatctcgctcacgacaatcccctctagttcacgaccagagttctctagattcaagaatgcctatagaagcaacattagacaggctactaggatagacaaagttatcacaaacccgatgcaagtagttctcctcctcgatctgtttctcgacctgcttctccacgcccaggcgcaggatgaatggatcacctttgcccgatgtcgcagaggcatcggtatcgacaagcccaagagcctcttgcaagttccgtacggctttgcgtgtgccgtcaacctccttgtcgacggtattcttgaaatcagccgagagactcttgatctccttagtcttcttctgaagatcactgcggagaccagtcaattggctgatcacctcgacctccacctcgacagctttattggcctcggtataaccctggcggtggaaattctggaggatctccgtcgcatcagccagaccacctggctgaagcaggcccggtggaagagtctggttattaacaacgctcgaagcagataggaacagctttgctctagtttcgtaggatttctgcacctccttaaaaaagagaatcaagtccttcagaagcttgcgccaagctacaaatcctagttagcaaagtctccctagcccgcgcattgacaagagtaaaagcccacctccaaaccgattcgccagcacctcggtcgggttcccattagtagggaccggagtcaggaaagcactattgacatcctccgcgccatcggcgtgatacttttcgcgatcgcccaagctcagactcctcacactgccggcgcgcatgctcctccggctcccactgcgccgcaagctccccttcttactcagcgaggccttcttccgcaaggtgctcgaccgggacgggctcgaggattgcacgtgcgacatggtggagacagagcgctgcactccagggcgatcgaacgccgagctgcggtggctgacggtatcaaagtcctccttgaaacgggggttgtggggaacctgcgacgactcgagggcgccggagctgtactggtatgctgacgtgccggcgaatgaattcggtcgcgacagagtcgagcgcgggccgtacccgcgactcaaagccccggggtcaatttgcgggaccatgtatgcatcctgtgagggcgtctgtggccgcgcggccatcgccatatctgcgggaacgtgggatattatggtttatgcaggtgtctcaggatagggagcgaagcagaggatcgaaatttggccgaaagttggaagtaaaaaattaaagaaagggaaaaaatgggataatcaggataatcaggataatagctccaagagtttacaggcctaaagtggcgtcgtttctggttacctggcgaacggagcaattgtatgcgggggaggtactggcagcatgagattcgccccactcggttggaaaaaaaaaggagaagatcaagagattgggctgccgacatagggcagagctggggaattaaagggaaaggaaattctgacgatgacgtctacgagatgcaagatggtgacgaccttggaagaaactaggctttcgggacgaccgggagaaaagagagggggaaaaagccatttgacttctcgttctctatatcttcgtggttgacgtactggatcggaattcaaagccgtctttacagtgtttccattcattctggttcctatactgtaaatagcaacgggggacttgtatacttcccttttatatggctgcctgtacgagaagtggctgagggactccgcccctgaacagaacgagcaagactattggaataagattattattgcgatcctctcgtgcacaagatccactcgatctgtggctcatacaatataggagaagaaaaataaagggggcgaggcacccttcccctgatcatctagtgatgaacagtgcatgacgtttggatctggggagaaggacagatcaagggcagcgactttgacatgttctccccggctcattcggaatactacatcttcacctgggtactgtcgagactttcttatctggctgttacatattgtgagtggatttcgtccgggccccgaggtcgagagtgggctgttgcttggcatcacgtgcgatgtatgcacgtcaggtgatatataaggttccaatatccagaggtacaatataacacagaactcaatgtcatatggtaaggaacaaggtacgatagtttattcgagagtgcagatatccattatacgctctcaactggatggattcatatttattagtgaataaagagacaactagtatacaagataaagcgccaagctaaattttcattttatgtaaaccatgacgcacagaaaatcgacatcgaggtaactccgaggccggctctaatttagcaatactaagctaggaaaatactgagatgtatttctcatatttaagattcattgagatttgagcagctaataataacagtttaagtattaccctaggttcaagactgtaattccaactgaagtcctccagattgactacatagattagatggtgctcgcagaaaaagtgggtaaagttcccccccggccgagaaaatgtggcgctcgacatcatatgagccatttgggcaaaatcaaatgccaaagctcaccaaataggcgtataagacagttgcttcttcgattcatttcgttctattgaactgatgcaaaattacctattctgaagacagtacggagtagatgaattgagaattacaattgcacgtactctgtacatagttcaagcatggtaattatgctcgaaggtgacctggatatactgattgacatattctgtacaaagccacgattcattatgatcttatactacatttgtcccttttagcctggaaacatactcgaagtcctccacttgtttgatatacctgcactgtcattggctcccgggtggtccggggataccccctcattttagagtattattattgaacaccagagtggtacatccatggatatctacttctagattcctccgtaatacttcttgagttccatgcgattgatcctacgggtcttgtagtctagatttgattgaggggcctggactagctactacactggtagtcacttccagcaagtatacccagaactgctcaattgttggtccaatcttgaatgtgtattgttttgaatttcctggagactaaagaaaaccaaatcggatgggattgtccgtacggtaggcagcgtgatatggggggataatttacacaaagcaatggaaaaaggcggacggcggactgggaagaatgtaggcttatgatgcaggaactggggatgtgggaacctcaatgccgtaattcgccttgagacgctcccggcgtctctcttcgtagccggggccgtagatacctagtggagtcagtatcggtagacaatgtcgctacccggataagaagcacataccacgtccttcacccaactccttgatggtctgctctgcggaagtctggaatgccgtgcgcaacgctgtccggcgatcgaactcgtccacggatggatctgactggtatccaaacagggtgccaccggtgtactcgaaggcggccatggcggtggaaagggcgacaccatatccgagcacagcggggagtgtgcggactgaggtaaacccgattagctccaagtacataaccatatactcaattcacttcgagaacttacctcggagaccgagaatggcaccggagaagaagccacccagagcgacgttgtagtggtcctccttctcacgcaggttggcggaagcgctcttaatgaactcataggtaccacccatggccgctttaacatgtctaatttagccattgctccatcacttataggtaaaaaagcccataccaaaggtagtaatgatgccaccgccacggacgaagacacccagagttccgacgttctgtttggtgagcgtgttctgcacagcggctgcgaagagaccgacggttccggtcagcgcggtggccttcagggctgccgaaatggcatccttggggtgataggtgttatcttcttcgtcgtggtgcgccatggtgtgtgtgctgatagcagggatggactgcttgcggtatgagatgtggttggcgataggattttggaagtcggctttctgccatacctgaccgccaccgcccacccaacggagctctacatggttatgttgatgcctctttcatattgaacattttgattcatttgctatcatcgggaatccccttagatactgcttactgccttctaagagtgggtcttgatctcaaaactgtcaagttcgtggaggagagagttccaaagcttgccagtgcttgctgccaagtgcagtgggctccccgcataccatacagtggcgatttcatcatttgacaatattgtcatcacagctgagctgttgcattgcgtgcttttctgagcttcgatgagaattaacctttgagaagaatcatatagcatcaaagcgcatattcaaactgcgtgaggcctacaggcccgaacacagtacttcatggcgtctgtacagaaggccggtaagagctcggaccagcaaacccggaatataactcgagcgaatgcttacaatattttctatcaatcatacaggaaagactgcgccacgtctcatttatgatgtccagctgtatgacccagcacacgatccagacacaggccgtaatctcctctcagaaactccacccatttatccacaaggctacaaaggcttacctggattcatatcaccagaagcatgtcgacacgaatatgccttgaaagaagaccagaccttcatgtcagaggcagagcaccggagaaggcctggtacttcgtccaaggtctcagccatatgcacaaagtgtcgttttcatcttcaagtggtggtcaactacaccagccatatgggcgcattcggtcagaaccaggggaaacacttgcatcatttggtctacaaatcaggacggcagaagcatggccttgcgctaccagaagaaactcccaaggggcagatcgcggagacgtatcactaccaatgttcctacatctcatgctcagctatggtgtctttgcgaattctttcaccgattttgagcccggaattcatccgcttgatgaccgatagagagttattgcggaaacgagcccaagaggccactgcagcgtatgctgagtccatggaaggcatgggtgatccgcagccgatcaatgtattggataatctgcgtctgtacattaccaatgccctacgaaacccacaacgcagcaagcccatttcctctgtcaataagaggttcatgcactctttcggcgtggaaggtgctccttgtaaagaattacttgaatttcttgagtttgtgtatgataaggtttgttatcaagatattgttttctcatatcgttcactgttgttgttttcgctgacgaattgactcaggataccggggcatggcacccacccaaaccgacctctgtcgccgaaaaaccttaccaagacacattgcgtctctttctcgacgacttgctgcatgaattactggtcttgatatatcatagaccagcctcggaaagaaaaggaagccagattcccgatcttccttcttctgccatccccgttatttcctgcgctctagaagcgcaagactgtgtgtacattgtgccccttggccctagaaaatccgaactaattcccgctccagatccgaaagctattcgttataaggagtttgaaatggctcatgctccgttcgtacaccctatattcaaattgataggactggatctgatacatgtttctttagtttctatgaagacctgggggtgatggaggatatgtcctcgtcgactgtggtcgaagcatacaatcgacagatctcagtcgatcctggcagaacctcgctgtacttgtctgctctcaacgctgtcggctttctgcgtggtgccgaagacaaggaaatcattgacatagccgtccagggagcatatgaacaagggaagtacaccgttgaggatgtcgtcgtcgcgtatcaatacttcaatctccacttcgatgatccaaacctcactgatgacagcatcattggcaaattctatgccttcctcagctctacaacgcaagagactgaagcacgtcagcagttgtggcgaattggcgactctaggggaagtgcgcgtattaaagcggcatcagaagagcgtgtgttgaccaagtcatgtcatttctagactttaatgtgtgctaattttgacaataggtgtttctaccgttgaacaagcgaatgtcttcttgggggttgaggatcagaccccagatgatttcgtcatgaccatgtacaccgcaaaggtatgtttctcgatcgcttcatttgtgagtcggacgccagctaatattgttataaattaggtcaatgacaacccacttaccaaagaactggcgaaacgcgccgtggcactcattgccgagtcccgcaaatcggtcgcattgaatcacttcatcaataccggagagatgattgctggtgaaatggacattggtgatgcctatcgtctactccaaatccctgatcgaactgtcgacgatggggcaatcatagccgcatatactatctgcatcgatgaaaacccaggggatgccgagagatacaatcaagctctgacgatcattgccaagcaactggacagctcgacgttgaggaatatggcaggtatctccaatgagcctgacagaagcatgaaagattggccagtcggactacagaacatcggcaatacatgctatttgaacagcctgttgcagttctacttctccgtccgtcctttccgtgagttggtcttggattttgaacgcttccaggtggatttgaatgacgaggaaaacctcgcaaataaacaagtgggatcacgaaaggtgacgaagaaggaggtcgagcgatctcagcgatgtaagttactttgtcagtgccgatggctatatgtctcaaactgaccctgtcctttgcagtcctcaatgagctccggactttgtttcgtagcatgatcacctcatctcagatatcggtttctcccggccaggaacttgctcggttgaccctgattagcccaagcaatgaggcggcaatgcgtcgtcgatcgacgataactgctactagatccgatattcttggtgaaatcaacggtgctcctgttctagggccccttgggcctccgcagtcccttctcggtgggcagatggagcccgcttcatcttctgtccaaactgatcccgtacctattcgaaacgcgaccgccagcgataacggaagcgatataacattggtctcggataacagcatggacgatgcacctggactctttattgaagacaaggagaacaaccccccagacttggaccaaatgtcggatcaagcagaagcaggatctccccaggacatgaatctcgacctagacgacagtgcatcggaaatactaccaccccccgtccctcctcgcaacctccctcaagttgatcgggaaaaacaattgaaggaggaggtggaaattggtgcccaacaggatgtgacagaagtcatcaacaacgttctgttccaaagccagtgcgccatcaagcctcgaggcattggcagtgacggtgaacagcttgaccaggtcaaagagtaagtcatgacagccgtacacgattgtacctattttaaccctctcatcagcttgttctacggccaaacccgctcttacatctccaccgataaaggcacacgttcgaaggacgaacgatggtgtgacatcaaggttgatgttgctcacggatctagaaacatctacgatgccatcgatggggcatttgatattcaaaagatcagcgtggaaaactctgtggccgagcaattcgcttccatcagccagcttccgcctgttctccagatccaggtgcaacgggttcagtttgatcctgtgaagaaatgttcgttcaaatctacaaaccatctcgggttgcttgaaacgatctacatggatcgatacatggacaccaaaaatccagatgttgtggatcgacgaactcaatgctgggagtggaaggcgtctctgaagaggctcgaggctcgccgagaagagcttctcaggacaaaggtatcgaatattctcagtcaatgtctacacggctaacatttttcttttccgtaggagggcaccggtgtcgatgttgcaacattgttccgtagagttaaaaccgcacttcaagatgtgaactccattgagaacgacgttgagaacgacaacgaaaacgacgttgagaacgacaatgagaacggcattgagaccggcaatgagaacgacactgaggccggagcggagttcaggtccgactccatgaatgctgtggctagcacggagttactggaaggtctcgagtctcttgcccacaaggcagagaccgacctgcgaggtaagagttctggcgttgctacttcctttgaaacagacgtgttgactctttttgtagctgtcgaccaagaaatccaggatacgcagaccatgatttccagccaatttgccgatttccataacctcccatatcgactgtatgccgtttttgtgcatcatggctcagtctcattcggccattactatatctacatcttcgactttgacaagaagatatggcgcaaatacaatgacgaatacgtcaccgaagtccagaacgtggatgagatcttcaagaacgactcgaccagcaaccctccgaccccgtatttccttgtttatgtcaacgatagcatgaaagaccgtttggcaaatccggtctgccgtgaggtatctgacatgtccgactttgccggtctggaacaaaccacctccatggagggtgttcagcctaccagccctgcgccagacgtgaatatggaacccccatcctatgaggaagcggcaggcatcaatggaactccaggtacgggaaacacagtatccgacccggagaccacaacatgacctcgtccggcgactgactcggagcagtcttggtagattccaatgccgcgcccctcgattcggccgctgtcaaccctctaaaacgcaagagtgttgacgaaatgaaatcgatccgtccgacttaatttcttactgtgtggcacagcaccttggacagcatgataacatgattgcatgaattctattctcgattatcttatgtctgcacgtggatattactgcattgcgaggtgtgaaatgtttttgttatccagcatgtacataggctgaagataccatggagtacttttagagtaagatagtcgaattgatctttctctctattattgatcttctacggagtacgctccgtactccgtcctgctcctttaattggttgttgtcccgggtaaaccttggaaaacatcaggtgaccatattattaagctgacttagcactcccgatttccacaagccgcggccgcggtaatcggatacggatcggctgtgatttcggcagcggcgaaaggaagtcgatccgccgatggaggttccgaagataatgagtatcaaaaaaagaatgcgatgtgtgtatgattttgcagtaatttctctgggatatttctaatagttagtcaataagttcagaggctccgggggttaaatgtattgaaatcggggcggttcatagtaggcgggagagagccgggaatccacatttccggggaaacgaatatcactcgggtacgataccgctcacactgccgtgcgggaatataagaagtggctattgccgctaccacaggcgtttgatctttttacaccttgatgtggacttgggattctttagtataatctctcatctaaaagtcgttcactatgccttcccaagtggcaacatgtttgcgcctcgcgcgtcagttctccaaccctgcccaggtaagtgatctgccctatagttctttttgagtcgtggagactgacaatgtcttgccttttaccagcaccaacgtttcattgcccgcgcattctctagcagtgtccgccgcagtgatattaacaaggtgtacccctccgccgaggcggcagtcaaggacatgaagtctggcacgactctgctcgctggtggattcgggttgtgtggtgtgcctgacacgctgattgacgctgtcctgaagaacccctctatcaatgacttgactgtggtcagtaacaacgctggtattgacggagctggtctcggtctgctcctcgagtccaagcagatctcgaagatgattgcttcttacgttggtgagaacaagaccttcgagagaatgtatgtcactggtcagatcgacttggagctcagcccccagggaactctcgctgagcgctgccgtgccggtggtgcgggtatccccgcattctacacacctgccgcctttggtaccgtggtgcagttcggtcaggtgcccctgcgacacaaccccgacggcacagtcgcaaagtacagcgagccccgcgacaccaaggtgtttgatggcaagagctacatcatggaggaggcaatcaaggctgactacgctttcgtcaaggcatggaaggccgacagacttggtaactgcttgttccgccacacagccaacaacttcaacggcgccatgggccgtaacgccaagatgaccatcgttgaggctgagcacatcgtcgagcccggcgagattgatcccgctgccgtccacttgcccggtatctacgtcaagcgtgtcatccagagcactttccccacgcagattgagaagtacacctacgccaaggaggagggtgctgacaccgctgctcttggtaagggtgagaccgccaacaagcgcgagcgtattgtccgccgtgccgctaaggagttcaagaacggcatgtacgccaacctcggtattggtatgcccgtccttgcttccaacttcgtcgacccctccatcgaggttgtcctgcagtccgagaacggtgttctcggtctcggcccttaccccaagaagggtgaggaggatcccgatgtcatcaacgccggcaaggagactgtcactctcaaggccggtgccagctgcttcggcagtgacgagtccttcgctatgatccgcgccggtcgtgtcgacatgaccgtccttggtgccatgcaggtcagcgccaagggtgacttggccaactgtacgttttcccgcaattccttcgtttatgcatataactaacattttctcacagggatggtccccggtaagattaagggcttcggcggtgccatggacttggtctccaacccctccgccacccgggtcgtcgtgaccatggagcacaccgacaagaagggtaaccccaagattgtcaagacctgcgagttccctctcactggccctgcctgcgtcagccgtatcatcaccgagctcggtgtcttcgacgttgacactaccagcggcctgactcttattgagatcgccgacggtgtcaccgtcgacgagatcaaggccaagaccgatgctcccttcaaggtcgccgacgacctgaagcccatgctgtaaattcgcatgcacactgtacgattctttaagcgttttgtatatagacattaggagttagattgtttcaaattaaggacatatcctggatatgcatcaagaggagcattgctctgacaaaaattcatacattcgagtagaaaggatagtactagttgtacaataaacaaaaaaagagcaaaggtattggtacatgtcatgcaacccatcatataaaaaaccccataatgctgacccaaatccagtgagacaataatacatcaagttttcccaagtgtttccaagttttccaacgtcaaagaaccaaaagtctatacataacagcaagaagaaaagcatcacgtcaagcggataataccagccagtctcttccgtaaccggccaaaccaatcgcggttcggtgcctctgcgaactcacggatgacattgtcatagtggtctgggttactagctggccggcgcagcttctccggcatgggatatttacgcgcgtagcggttattcagcagcgattcaagtgcattaacggaggactcggaaattgctgggccggacttgtctgcggacttgagacgggattcgatataggcttggacggagactgaagccgggcggactgcgtcggaaggccaatgcttgaggatgtgggtgaggcgactttggagggagcgcgggttgagggcctggatgatttgttaggagatttgtttgggattgagcatcggggggcttttcgatggtgttgggataattcagatgttgggtaagatactcacaggtgctttggccatggtggacaagcgatatcacacgataattgtggtctaggggaaggatcttcctcatggaagttgaggcaaagaccggaacagtctattttggcctggcgcatcaggcatcaacagccacatccattcctgttgccttctcgtcgaccccgtcattttgccatccccttgtactctcattatatcatttttttcttttcgccctaagttattcctgtctcaatttcctttctgattctattcagggtcgcttcccgctcagctcgccatgagctcgcagcgctattcacgggtacccaatccccctccccgctgatcccctatcagaacaagccccttggatgggatccctcggcaacatactgaccgcgactgtctaggtgaatgcccaggatgaagaggaaggaccacattcctatccgctgaacgcgcgacctgaacatagcaactcttcaccttcgtctttccgttccggatcccgctcgtcgtcacgatcgtcaaggcggctattacaccacgatccgcaacacgacgatgacgaacagacactcgccgatgcttttggcgacgaagacgggtccgatgatgataatgagccggatgaccgacagcgcttgatgcgagcagactccgacttccgtgctcccccggataacggccctaccaccacggcctcttcgtcggactcgagaggcgatccgcaggatcagattcaatcagggcttctcaggcgaccgacgctattaccaagttttacgaccccggcttcgggagggagtcggcagatcgcctcatcgaatgatggagtctttgccaatcttgctgccaagcctgaacggggtgagaagaatgatgatcttcctcctgtaagttgatcattgatatttttgacccaaaaagaaagacttatttactgatatcttatagtcatacgaagaagccgcagctgatgcgacaccgccatattgggagaccaccattgtagctcctggtatctcgtcagacgaggtctatgtcgatggattgcctgttggatctgttttctcatttatttggaacgccatgatttcaatgtcattccagctcgttggcttcttgctgacctatcttcttcacaccacccatgccgcaaagaacggcagccgagcgggtctcggtcttactcttgttcaatacggcttctacatgaaaggtggcagcagcgacagttccggctccgagggtggaggctccgaatatgtccctccacctgaccccaacagccacaacttcgaccctaattcggttggtgagggtgggggtaatggagggaacggcgccatctctggcatcagcaccagtgaatggatttcatatattcttatgattgttggctggttcatcttaatccgtgcggtcagtgatttcctgcgggcacgacgtcatgaacagcttgttttgcagagcccggatcgtggcttgggtgtaccagtcattgcagagggcgaacgatccgagactgttgtctaatatcgatatacggattctcacttgaatcaattttttttttgggacgtggacatggacatggacatggaaatgtctggcgttgcagcatggagtttcttattgtatcgacaccccctaggagtactgcctccggattgcattccttcaatttttcctttcactttatcacaccattttatctttgtctctgaccgtgtagctattctgaagataccaaatatatgaacaatgaaccatagcagttatatttatgtagtgatgtcaaccctaagtcgagtctcctagaattccactaaccacttcatcagcttctatgatcatcgcactgtttcctcattcaagattccttctagagtgaaatatcccgcagcgccacccattctctctcggctacaggtccgtcttatcattttatgccgcggcctagtgcccccagtcatagtgcgcctactacagtgcccagcacccacctactatgcgctctcagttgataggacaatggtccctcgttgaacggaatacctatataggatataccttgcctttacacctagtagcgcatccgagaaaacgtagaagcggagaaagtactcatcgctgctccagtatggtggtcttccgcactcggatcaggcacaccgtccagtcgcaccaggcctcgggtatatcatgcgcgtgcaaagcgtcgagggcgaagtgaggatctcttgatgacgaagacgtggcgacggctgtctaaaaaaagaaaggcgctctcagagcgcgtgcgcaggagtcacagaggtggctgtttcgtctggcgttggaaccgaggaaaggttgttagggttagaagggcttagattgggcgcaaaatataaatatggatgttgctgtaacatagtcgtcatggatgaggtggaagttagtggaaagtgcggctttcggtgaatttctttcagtcacggggggtcttcgggggattgacagccattcatagccccaacagcggtaatttccagcgtcaattgtattggcgaccgcagattccatctatattgtaggttgttacaatagatagtagatcccaacgtaatcgcagcccaagggttgctgcccgcgcatactgcgccacgataggcagcattctatatccttgtcctttgcccttgcattcctttgtttctcgcctgtgtaacttcaccccattggatgaacagaaaggagcgcagaaaagaagagaaaacagaaaacaccaggcccttcttcctcggcggcatgaccaactccgcccactgccgagagacccattgtttatttgttaacctcaaccccaacataaccccagtctttctataattcacctgcgttccttgtcggggtggatcgcgggcttgtccgcaatgtctaccatccctcagggccccgttgaggcacgatcactgtcgtcggttaccactatcgcatcaaatccccccgcctatccgcgcaatcctacccacgagaagcacgaaccactctctctgtacattgtgcgtgtgccaggaagcaaaggtatgagtcaatcccatattgagactatgctctctttcttttggtcttcaaagccccatagttgcgcgttaccgtgctttaacaaccccccaaaaaataaaccataactaactgctatttatatgtgcagacatctttctctcgcctctcaaaccaccgactaagtctagtgtctctgctgaggcgatcaacgcctctctttactatctccatgtcgcgactcccgacgatgataccctgctccaggaagtagaagaagagcgcgcagaggaggcccaattgcgaaaggaacgccttgagaaagcgggcggcgatagccctgtacaacacgagttcgcgcggctgaacaatgtgcgccggaaaccagttggtggaggaggtgatcccaaccccgagcgctcgccaacaacgcctcagcaagatgccactgccttgccatcacgtccgatccctgtgttgcaggataaacctgcctctcctgccttgccaccacgtccggcctttatgccgcatgctgctgcttcgccgaccttaccaccacggccaatctctatgccacatgccgctgcttctcccaccttgcctccacggccaatccccatgccgcaggttactgcggaaaatgtatctttctctggaactccagtggctaatatacatatgtctggaggtgtatcaggagagtctggtggtaagagcggtattcggtggcgacctttaccttccttgccgcctggtgaagagtcatgggccaattctccagcaggcgaggacccgtctaagaggacatcccgatggagcgcgtttgccgaacaattgcagagtcgaggagagaactggaaggaaaagtatgaggcaaagtacgaggcgctgtcggctggccgtcatagccttgactctactagaccacaattgcggccgcgttcctcgcataaccgtcccggatcaccattaggaagtccgggacaatctcccaaccgccatagaaactcaaatggaaaccctcctagcaatgctggctttcatatcacgctcatccgacgcgatcccacgtccggtacacaatggaatgtggcaactatatcaaccccacgaatggaccgcaataccgtcgatatcgagatctccacgccggggtataacaggttcgcaggctccaatgagttgccttcattatccaacctagcggtcaatattccgacagggattggacgcctacccaactctgccattcctcaaaccttagccaccgagcagtcaaaggagcagtcaaccggcccacgaaaattccgccgccagctctgcgtatcgaagccattcgacgactccgctgccacggatctcagcaacggccttaaccaagatggtccatcctccaagctaaaaagcggctactacgtcttcacgtctccttggaatggcacatgtaccttcacaaccagcgtgaacggccgaagcctcaagtgcaaacacatgatcccaacacccggcggcttcatccctacaaacggtgaaacagaagcaccccccgccgtaactgtcgccgagctccgcttcaacacccccttccaagcagcaaacctccactcgcacgcccaccacgcagtccacaaaccgcacccgaaccacatttcccccttcacccaaagccaacttcaaaccccgaccatcccccgggcaaacgactacccaaacgacaacaactcctacgaagaatccctccatccatccatctccaacaacagccacgcagccgcaaagcgcaatcctctcacccaacttctcaacccaaacacctacacccggccgcgcgcacactcaggcccaggcccaaatatcccacctctcccggcctcgcccccagcagactcacgtccaaatttcagcccttcaaccatcctccgcagaacctccatgcatgcgcaccgcttcgcgcgccatagtcagcatcattctacttctcagtcgcattcgcaccgcagtacgagtaatagcagtggcggggatttagatcacgagtctgatgaggatcgcttggacttttcgcttgcgagggagcctgctggtggtgggttaagggggaagagtgccaaactggggaagttggttattgaggatgagggcattaaaatgctggatttggttgttgcggcttgtatggctgtttggtggcgggggtattattattgagatatattgatcttttttgatataagatatcctggcttggtctctagggcgagtctgctggctatagtcggttagttttgctatgatagcgtatatgaatatatgaattccattttgtctggtctaattatccctttgtctgatatatgctatttccaaggcttgcgatgatcgcttgcgcagcggtacgaagttcactgaatcacttgtctgtatcatgtatcgcaccaatcggcggaggtatctctatctccccaagctacaagatggcctcctatatgtagcctggccttagaaggtgctagtatggcaagtttgaacttctgtagttttgcctatcaagggttatacgtagagaagttttccacatttttctgctgtctatctataatacttaagaagggcaagaatatgcctatcaaaaaagatcaaaaggacacaaagaagacctcaatcgagccaactagatcatgtcgttcttaacgatagaggcaagcgcggtcgacgtgataattaactaggattttcacatatgagtaacagcccacatgtaattcagtactgcaggtcctagactgtaggtctacaggttccagggttagtgagcacattgcatagccctaactagtactccctactccgcagatgtcaagtaaataaaaagtggattcgtcgacaacgccattcgaaacccaaccgtcagccttacagcataggcacatgacttcccaaaagcgtaggaccaatcacgttacactacaaaggcccacatcccatctccataacgaaggacctgtaaaagagaaaaaaaataggtagcttctctttgattgagcgtgtcatccttagtgcaggggccatgctaatcttctctgtatattttcatttgaccatatgccccaaagggcgaagtatctatgcgttcagttcactataacctccatttgggggcagaacgttaccgcctacctgttttggtgtgtatcgggcgattaggcacgtggcttggcacgtggactttcccgaacgggaaactatgctccatagttagaggtggaagcttggatttgataaagagaaatcgggtgattagctagcaactgtcacatacagagtagtactatgtacaaaggccaatgatatgtttgagctacgtgttctaaatggttcctcattgacagacagcagacgaggggggagagttgattgacaatctatctaatgatcctacttgaaagagatgcaatgcaccgagtaatgacatagacagagacccaagtatcatatccagaaaccacaaccaatggcgccttgaaatttggaagtagtcaaaggagtcagacatgaacagaaggttataccaaaataaataccaaacgcagacacaatccaagctataacatcgggcgagagggcagaccgcagaacctcaaatagagatgagaaagtcgagttcgaaatcgcagttataatgatgaaaaaaggacccccatgtaaatcgtcccagtcttttttgtttctctgatggtatctcttggctaaattagatcaacatgcagggcgcggtagaagacacgatcggatttcaacacgccgaacaaccaacaagtcagaaagaagaaaataggtatcaacggtgatgcacgtccatgccgcgctgcagcgaggattccaagtcattagggttgtagccaccgccagcggtagcctcctgaggtctaggatcctcggtcttccaaggaccctgttggttatctggaatggggatgttagtctgctgagcgacctgctgctgctgggcggcgtgggcctgcgattgctggcggacggtcgcacggaagcggatgacctcgtcgagaatcatcttacgcatgtcgggaacttcctcgacgacctcgaagtggaagtcgaaggtcgtggggcagttcggctcgtcggaggcgtcgtgccagatatgcaggtaggggtgctcgagggcctcctcgacagagatacgagacgatggatcgaacgctagcatgcggtccaacaggtccaacgcatcggggttggcttgagggaacagctgcttgaaggccactttcggcatgaagggcaggttgcgcacgtattcctgggcgcggggcgatccaatgcgcgccagggtctcttcgttaggtgtacccaggtagtgcaagatctgattcagctggtcgacatagtcacggcccttgaagaagggtcggccgccgaggagctcggcgaggatgcagcccacggaccagacgtcaactgcacaagtggggttagcggggattcggtggcaaattatgcatgccggtgttacatactcgctttggtatagctctggaagctcagcatgatctccggtgcgcggtaccatctcgtcgcgacatattcagtcatgtatcccgcgttctcctccgggtcgattgagaacccacgggccaggccgaaatcacagatcttgagctcgcagtccgcattgaccagcagattaccgggtttgagatcacgatgcaggacgttggccgagtggatgtacttgagaccacagaggatctggtagatgaaggattggaagtgggcgtcagtcaaaggctggccggagcggatgatagcagccagatcacattccatcaattctgcaggcttatcagtccagctctattcgtcgcaaagcagcagaccacgtaccctcatagagatatgtttcgttgaagttgtccggtcggggaatatccatatcgtacaggcatgtaatctagagggctgagttagcgcgtacaggtaatgataaggatgatctgcggcctacattgcgatggccacggaaatgctgaagcagcttaatttcacggagggcgcgcttggccagaatcttcttgctgaagacattggtcaccttcttgacggcgacaccttcgccggtctggatgttggtagccgcgctgcattatgccatcagcacgtgtccaacgagtatcatccactggcatcaagacctaccacacgataccataggctccctggccaagctcctttgtcacattgtattgctcgctcacgataaagtcctggttgaagaccttgaagaccttgcgaccttgtaaatcagccatggtgggatgtcgcgtcggagagtcgtagagtgttagaaggaaggcaaggcgacgaaggaaaatggaattggcgagggtccaaggtgtcttcaaaaacaaaaagagagaagttgaaggggaaaaaaagggtgaagagtcgagagaagtgtgatgagtttcagccccgcagtccccgcgggtgatccgccacgcaaaagcgtttaagtccactatcgctctgaatgaatttgaagtttcaaagaagttctaaatttaattaggaccgaaagacctactgtggaagacttggaattcttgaatatccaaagattaattcatttcgccgtcgaaagagtgaaatagagtctattcctttgtataccgtctccatacagactacatatctgcgtcctcgaaagcaaatcgaacaaagacttggaaagcgtggctgaaacatgtctttgaacattttctatgacgtctctaaggttctacaggaaccagtctaaaccttttagggctacgaagaattcattcgaaagaaataggtgtattaaaggatatacacaaaggacgacagacatctcaggagagctttatccttttgcttgcagggagggaaaagttcaaccgttgctgtctcttgccagggaatagcgtcttcaatgtcgacgcctgccagtaaacccgcctgctggggggtttacagaggtcgacgaacagtctcgccagcaaggctaattgctgggcgtccaccagtgcgcggtggttacgccctgctagaggatgagtatctccgaagagcaaagcaaacaccaaaggtagcttgagaggaaatgtcctgcctttgaagcaggtacgaccaagcacccgcctcacgttggtgtggaactcttgaaggagcaagcagacattctcatctccggggagaacacagccaagaccttcttgccgcagccattgtcttaaatacgacaggtcgaaggaccatgacctccaagacaggaaaaagggttggttggagataccgactccttggggtttttcaacgacctgctttacacgaaggcggccatccgacgtaagatactttttgaccttctcttcatacgacatttgcaaatgagctagaggtacagggctcgacgaggaaggcgcgatgactccgtcactttatctggcgatacaattgagtactcctttcccttcgatatcagcgaggccaatttcgagcacctctttggaagtgaaaccaaattctaggtcgatattcaccaaataggaaggagggatattggactcgctgtcagattccatcctcctgatgaggttcaccattatttctgtctcgggacgccactgctgagaagacgctgtatcgaacaaagtcctaagctccttcattgcggcttcatcgtagacgaggagttctagcgtccagcaaagaaagtgttcacggcaaagtcttgagccctcccacgtaaggctgaagcacctcttatggcagcacaatgattgcttatcgcctgcctccagaaaattggatctcaaaaactcgttaaacacaaaccgcccattgcagggtcggcatttgagcccaatatgctttctttgatgatctttgtaaaaaaacacctgtttggaacgtgattctcgtgctatttgagcacggaataccaagcactaatccctcaacgacccttcccggccccgggcacttaaggccgaggtgaagaaggcattcagaccgagcagctaaattatgagaattagcaatgggatatgaggtagtaatatcttgtatgtcttactttttctgagtctgtcttggtctttttgcggatcgtccttctgcgtatctttcaacctcctggctgcccacttcgtggtcgcttcatgctcggaatcctcaacttagtcgtcggatccactttccaactcttcctcttctccgtcctcttcatcattatcaactttgtcgttcgcggcttcactctcacaatcttcgtctctgggttcattctcggcttcaagattcgcaccggggacctgtttttctcatgagtaatgctcatttgttctttcgttgttacataccttcaaaggtttgcattccccctcttgaaagtgtcctcgttgaacatgcttcttataatgggctgaggcggcaacctgtgtctgcttcctaccttgtatttgagaaaagcatcggtcgaactggcacagccacctgggcttgggataatgcttattcacatgttgttttgcatcgtagatcgatgggaacgtttcgtcacaaccgaatgtctcagcgtactcacggggccaacgagccctcatatggacggccaagtagtgcttttttaggttgaagtaggttaagtatgttgtgctgcaacctagctctgggcatatccacctgccatttctgtgggagctcgtcccaatcaagtatgatttttccatcgacatctctgaggggaatatgtggcgatgtcttgggccacgccggaataaatttcccatctggctcaaatttggtatgttttgtttgagcatgtgcttttgcattgccctgggaagaaaatactataaagcatttatcctcctgcgcacgtggacaaggaaactctttctctccctgatcaccatgagcgttcctcgcgtggcgttgggcattgtgcttgtctgtaaatttccaatcacaccatttttcgtcggccaggggacaaggccacatgggtttcccatgtacctcctccgcatgtcgagctgcacttggtctcgtggcaaatcttttttcacacttgatcctatttgcgcctgggaaggggaatcctttccctcctagggagcgtcgcgatctcttaccaccatgttttctcgcttcgtgctttttagccgcacctttgctacgaaacatctcggtacactccttctctttggccaagggacatggccatctgatacgatgatgttccctttcagaatggaagttcgcgttcccttccgatgagaaggttctatcacagttgagatcctttgcatgtggacaagggagccttggcctaattcccccactatggacaagctttgcgtgctttgttgccgtatctttggcaccaaattccatagtgcaggacgtttcctctgccaacggacaaggccatctcacttgctcttcgtcatgcttctcagcgtgcgcctgtgcatcatatttataagagaacttcttttgacaacgaagctcctctgcgcgcggacagcgccatttggcttgagcgtggacttttgcggcatggccatttgccctccgtttcgagtaaaaggtctcatcacattgaagttctcctgcgcgcggacatgggaagacttcgtgataaaggtttgccgagtgatcatctgcgctagcttgagagctgaacctcctgtggcaatgaagctcctctgcacgcggacatgggaagcccctgtcatgtaccttgacatgcttgctcgcgtacttctacttctttgatgcgaatattttgtcacatccgaactcttctgcgcgagggcatgggaagggcttctccttcattggtatgttgatgaaagtggttggtggtggtgttgaaggtgtagagacttcattaccctcaccattcatctcacccattttagaccttatatttatcatcatcctatttgatctgctctctctgctgaaggtaacgagacctccggatgatgccaatgaggtccaaaatgaatggatgagtggttgaggggtgaccacagcagagcgagcagtatgatattccctatgagatttaaaatggatagatgagcaagaaggaaatgaaaagagctggaaagaggtgagcaataagagaggggatgaagagagaaaggtgattaacaaacacttcattaacaaacaggccataagcaaaccgccatacgcaaatactgcggtagcccgcatcctcactttaacagaagggtgtagtgacctaagcaatatacaagttaccgagtccgtcataaaatcggacttatgattttatgatttgagtatgcctttgaaaccgcctttcggttggctcttttaagttgtctttatggctgtcttttttggtgttttattcgtgcctagacctcggaatttcccatgggaagatccaatttggccgcctaattctagtggccaactagagggcatcccctcaaacgatgagctagctgctcgggctactctcgcggtcaaggcttcgcgcagctaggtgggagaacgctcgccaagtaacacaacactacaggctattttaaagcgctacccatgggggcagagatgagtagtcaagataataatattaattaatgatggctgagagggagagaaccaactacgcaatgggaaatatggctgtctcagacgtagcacatgcatagtgtcaacaaaagatgctattttgacacataggataaaatacgcaaacatatcttaaagcttgatttccttttatgggttcaatctacaaagtctctgctatatgaagttattgggttttgataaagacagaaattagggctaagaatgatacggctgagtatagggaccagaagggtagaaatttcagagagctaacgacggtacatactcagtacgcttcggccttttctgataggggctaagattcgaatagactgtcgaccagaaaggactcctgtaatatcgttaatatccctggtgttgtagtattagttgtatttacgcataaacacaattatactcattttagtttttagaccaggatcttttcggcagaaaaatgagctccctttgttcaacataggcttccctatatttagagtcaaggaatatcggtctatcaagtgtgtttcagaccctaattactctactacattaggtatgtatggaatattcaggagaatcagtagaatatccgcatgttcttcatttcacttttcacttttcgtaaatcagtaacgaatatgtcccctacagagtgttctccaaccgacgctccttgcgcagtgctcggagcttgacccgcgcctcctccagagggaccatgatgcccttgttttgggtcgcaggatcatcacggttgcgaatgttgacagtgcgtgcctccctctcctgggcacctacaacaaagataaagttgtactgggccagctggccagtacggatcttcttctgcagcgtgtttccactgatgtccacgtccacatttaacttgtcgccctgcagaatacgctgcagctcctgggcgtaatcattcaaatccggcatcaccggcacaataaggacctggcgcggactgatccagaacggccacttgccaccaaagtgctcgatcaagatacccaggaatctctcgaagctaccaataatagcacggtgaatgacaacagggcgggcgcggccgggggggagatcgttggactcgccctccttcgcgctctcctcggggttcttctcccggttttcgttggtctgatactcaagcttgaaattcagcggagcctgatagtccagctggatggttgcgcattggaattcacgcttgagagcatccgcaatggtgatatcgatcttgggtccgtagaaggcaccgtcaccctcgttaatggtccaatcgttacccttaaacttggttaaggccttcttgagctggtcctcggcctggtcccaggtctccaacgaacccatatacttctcggggcgggtagaaagcttcaacttgaaggtaaagccaaacagaccataaatggactgcaagaaatcgaacagaccctcgacctcggacgaaatctggtcacgtgcgcaaatcacgtgactgtcgtcttgactgaatttgcggactcgggttaatccgcttagggccccggatgcttcatttcggtgcaggacaccgaagtctgcaatacgcataggaagctctcggtagctgcgttcacggtgaccgaacagaatgaagtgtccagggcagttcatcggcttaagagcccactcgcgtttctccacatccaacttgaacatatcatccttgtagtgctcccagtgtccggaggtcttccagataccaacgtcgtacatgttgggggtctggacctcctggtagcctcgcttgcggtattcagaacgcaggagagactggatctgattgagaatcttggttccgttggggaggagaaatgggcagccgggggacacctcatcgaagaagaacagctcttgctccttgcctattttcaagtggttccgcttctcggcttcttccaagaacttcaagtgctcagccatttgcttcttgtcggggaaggcaacaccacgaatacgctgcaaagagtcgttggactggtcaccaaggaagtaggccgatgagttctagaattaaaagttaatgtgtctcttactcagtcaaggggtcgaacagtcacgcttacctgcatgatcttgaaggccttgattttaccggtgttctgaatgtgagggcctcggcagagatcgacaagggtaccgcaacggtagacggtgctgctttcaccggtgacgagcttgtcaatatagtgcagcttgtatttgctgtaggcgaacatcttcttgagattctccttagaaacctccaatcggtcgaagctttgcttctccttgaagatgcgcgacgccttattgtcaagcgccttccagtcagcctcgcggacaacacgtctgttttgccatgtagattagcattggcgcagttgtgaatggtaggtgataagataacatacccatcaggcatggccatgtcatagaagaaaccctgaggggtagggggaccgtgggaaagaagacatccatattcgcattcacatgcctcacccagagtatgagcactggagtgccagaatacatcacgggcctcggggtcgctgaaaggcacaagaagcacactgcagtccctctctagaggccggttcaaatcccacaattctccatcaaccttggaaataacgatattggcgctgatatccttgggcacatcgcgcaggaatgatccaggggtggtctcgaaggccttagcagggactgaggagggggggttgccgtcgccaatgtcaagggtaacgttgatctctgggtggggacgagtcttggtctcctcgaggtattgttgccaaagttcttcgaagagcttgtttcgctcaagcatgacttctgggagagtatcggggctcggagcctgcttgggtttcgctttcgcatcttttggaggggcagccgcagcttcagaggcgttgttggcctgcgcttcagcggcaggccgtacggggatatccttgggggtttcggatgccatttttgaaacccttggagcaatagcgcaagggaactagactgtgagcaagagcaagaagtctaatcgcggcgtggaggggaaaatgactctttgtgagggcggtgaaagataagtctcgaagtcacgtgatggtactgcccttagccgacactttaccgcttcaagtttccaccaagcgaaaacttctccagctttgtacaagtcaatcacctttatcaccacaaaatgtctttccgtggtcgaggtaacgcttctggtgccaaccggggaggtttcggtggtggccgtggtggtgagaattttccaacctgaatgcgatgcgagaagttaaaaggagctaacgaaatttttttgttgcaggtcgcggaggcttccaacagtcattcggccccccagcccaggttctgggtaattattcttctgaacctgactgtaattgattcatgtcgctgatatgccgatagagttgggttccgtgctgcactcttgcgagggtgagatggtctgcgaatcggtcaaccccaagattccttacttcaacgctcctatctacctggagaacaaggtacgccatgactgccgcaaaccattacaatttacaagtccatgacctaactgggttatagactcaaatcggaaaggtcgacgaaattctcggtcccattaaccaggtctacttcaccgtcaagccccaagatgggattgtcgccacctctttcaaggctggtgacaaggtctacattggtggagacaagctgcttcctctcgagaagtacgattcgctgttctactcattcttatatactctgactaactcacctcttaggttcctccccaagcccaagcctcccccaggagctgctaagcccaagcgcgccggtggtggtgctccccgtggccgtggtggattcggcgccccccgtggtcgcggtggattcggtgcccgtggcggtgctcctcgtggccgtggtggcttcggtggtggtcgcggtggtggtttcggtggtagcggtggtttctcccgcggcggcggcggcggtggcttctcacgtggtcgcggtgcccctcgtggtggcggtggcttccgcggtcgcggctactgatcgatccaatgtactgtctctttttggcgttttgggggatctgggagctttttcaggaatatctttccgtcttcttgtgcatcctgcgcaattgcaacttcactggctgcaggctgtagaatatcaccagtcaaaaatgtttctgttatttttcattggattttccagaacttgcaattaaaccataagacattcgtttagagattcggggatgatcggctggacatttggttgggatgtggctagcagatgtggcgcagctgcaccgcccctgcctgcctgcagtttgaaatgacgttgaccgctcagcgaatctgtgcgtctgtcaacactcccaagcaggattgacgacatttttattcttcttacccaatctcgccctttagacattttattgagacagagtatccttttgccgtaaaaattttcgaatctgatatccatttgagcatgtctcgtcggacatcgaccatggcatcgagcaattcttccagcggtgtcccaccttcaggcgatggaggtgtgtttgagctccctctgatcgtgcattggcaatatagctgacatttttcaggtcaggagaaacagaaaatgctactttcctcggatcatggtcatttcagcctggtgaagtcagtctcgtgcttcccgcgctcctttgccctcggttcagtctaacactcaacagggccatgcatcttgctgatctgattactgaaatgaatggtaagagatcgcaagatcttcagactttgtttgaattgactcgctaactctatcttaggtttctgtggaggcaagctcatgttccccaaccgtttttccaacccgcgactaatatgttgagcagtcatgtcggtattctcctccatgcgctactgcctcggagacccaactgaatacggttccatctgggctgccctcgcattcatgcctttcggtttgttcttcgactttatggatggcaaagtcgcaaggtggcgcaagaagtcgtctctcatgggacaagaactcgactcgctagctgacttggtaatggatccccgcgaataaccacaagcgagtttttgctaacacccttactccactagatctccttcggtctcgctcccgccgctgccgcattcgctcttggtatccggacctcgcttgatcatgtcttcctcacattcttcgttctctgcggtctgacccgcctcgctcggttcaacgtgactgttgccgtactgcccaaggatcaaagcggtaaatccaagtacttcgaaggcacgcccatcccaaccactctttcaatcgcctctgttatggcctactgggtctctcaaagctggacgcacgagaacattcctcttggacttgtcgcagagggtaccatcttcgaattccaccccgttgtcttgatgttcgttctgcatggatgtatgatggtcagcaagacgatacacattcctaagccatgagctcaacccatacttggccgcgcatttactgttggaaaaaaaatgcctgagtctgttgtctctctcaacttggacaactgaaaataaatatcgagaggggtttcgtttgtaggcaaggcatagcatgatctcgatgcacttaaatatggatgcttaattgaatttcaattgcatagattggctatagtcattgtggtttctgcgtagggtggtcaaggtcaacatattgaagacgtagctttcggcaacagcgcaacccttgtaagcaagtgagccatggattctctgtcaaatttaacagcgcgcaatgcacaagcaatgctgaccactttcataattccatggtcagtacacgctgagaaatcttaaaatgaggtagggacaagatagaaatatcaatatgtaaactgacactttccctggagggtacgccttctgtgtgtgtggagatatatccactgttcatcatagatattgtatagacatccacgcaatgttgacctatagagatcgtcataatgaccactcgactaggtatctctacagtccgttcaacgaagacttcaatacgacaacaaatcatctctgaacacagcaagctgtagtgaaggcatgtatacatcctccctattaccagctcgtagatcgcattgcatctaatccaaacactatagcgaaccaagcctaccaccaccacccgtggacaactccaacgatgaccatcaccagactgagcccccccaggtgcccccaatgctacagagatggcataatacggatcgtcaacggcaacatcccgaatggcaatgcaggtcgtccatattatatatgttacccatgtgatcaattcatctgcttcgctgatgcacgcgggataggtcccgctaacccgctctgccaatgcggcgagtacactcgtaggcagatgtcgggggcgccgcatgggattcattatgtttgtgctcggggatggtgttggttctacgagaaggagatggagatggatgctgtccagcgacaggttcctgccaggtcggtggagatatgtgcgaattactcttatatctgagatttgaggtttggtttgggtttgggtttgggtttgaggatgttattgtgtttgttcttcttttaaggtggtttgatttccgcttgtcgtgattttagttttaatgctgaagcctgaattaagtacccaactggttatgtctcttctccgtaagcaaaacgatactctctcttccgaggaaagcattgagccggcccatccgcatgctctagaacatggcagctagcatcatcgaaggtcacaggcgaagtcggaattttaggatttaaaattagaatagcgttgacacttgctaggcatacagggaggcacacagggtctagacccacagtttcactttgatatctgaattcgaattttcattacccacctagggttcgatctagacggccaaatacatacgaaagattcaagcaaatcaaatagagtcgtttatctttcaatttatattctctcgtggaccggtaagagaattcgtttctacatgatccctttgacaggtggagaatccgactggtctagtggacgccactggtcccggaatatctcagtgtggtccagccggtatttccgtcgataaggtctaggcatgtgtgcttgttgacatcttactgtagagtacggagtatgcagtacagacctgtattgcctgtgtatgctacgtttttggaggctcttggctaggatgtcgggtcagacccgatcatgagcaatatgtctcactgttggaagatcgctcatccattgagcttttattgcttattgtttgctttgtgggctatagagttagacgtgggcgcctttagaaggggaaagaagggaattgtgtcgaggacatgagttggctataattatcaatcgtgggcaacgagacgctaagttacctgcgcaggcaattctgttgaccgttgaggagtttgattcccacatagatcacgaggttatctggcagttgcaataataatagaatctctgactcagaataggcaagggactagatctgcaaggtacagccgatatattacacacactcgatctagagcgcatttggccactagtaactttatctctctgttcagtaaaggtcttgtataattctcgcatgatggtaatgtggttgggttaataacctccggtatctcagggtttgttatgagaatatgtagacaatgctatgcagtcaagtcaggaacaaaatacttgaagcaaataaacctcgagaaatacaacatatcatacaatatacaagacaaaagttcaagatcgaacccaaccctaatacatgccatttatagaccatcatacaaaggtagatcttgagccgcagccctattttacgagtcaaattatgcggttttttgttacaggaacggtacggcgtattaccgtagggacagatcataatttggtatactccacccgggagtggccgcgcattacccatggaaactatttggatacgtggaaaagggggcatgaacaaggatatagaagaaatcgattgagtacggagttcttgcgattacatgaagtataaggctaaattccaattgctaaatccttcatgtttcatgttgtatggagtatggagtacggagtaacgaaggttattatcccttgtacggagtattcaaattaactccgcctaggaaatgagccctgaaatctctttcaacagcaaactctgcaatctatcaaatggagatctaaatttaccctggacaccagccaaggatacaattgtcagccacaaaggaccgtggcgtatggtaaccggtcatttaaagcgaaaacacaacagagacggatcaaaagcatcgttagccgaggggtgcgttgtacaattttgaggggtaaaacactccgtcgtcatcaagggtcttcttcatgtggcgaaggatgcaggtaactctgtaaagtacggagaaatacggtacatactctgtacgtgcatacataatattgattatccgtcgaggttcacacaatgagggtctcataatcaccgcttggcacccgaagaagactagcggcatgtccaaggactccatccagctcccgtgtctgacccaaataggaaaatgatcaaccacagtcccctggcttaccggggcaggtgcctgattacctaaatatatgtcgacgtctcattggtgggattgtttgtttgtctactttgtacctggtattgtaccatacaaggagcaaacaaccttgaaacgacccgcgaaactggtgggctgaaagtattcggtactcgggtacaccagggttagcctcctatgttccaagtacctggtacataatgtcacttctccggggaacacagaccccttaacagtccctttctcaagggatccattatccgtcacttcgccctcctgatcttcctcccctttgcacacattcgttactcgatttcttcgctcgtttactccctttattcgagggttatcaactgaattgctttttacttcacggtcgctcactctctcccgacttgtagggggtgatcctctactcgacaacgtactccaggtaccaatcaacacaacgcgaaatcaccttcttttcactctttttccgaccgtcaaagttcgactttcgaccatacgccctgaggatctgaccgaataattcaggcccaacgtggtagacacttttgagaacaaacgacgtctactggcatacattcaaacagaagttcttgagggttacgcaggccgttcccagtccttcatcaatcacccctgcgactgtgtccagcggtgcttattctcttcgttgatttcgatactcgaattcactactctcccaacacatcatgcttttcaacactcatggcgccctcgtggtgtccggtgtggtgatggcagccgccgcggcagttccagaagacttcaaggtggtccgtcgtgcgccgttagggacacttcaaggttgttactctagcattcctggatatggaaagtcaacaggctggacataccaaagttccgggtggtgtctggaccactgcgccaaagactacgcgacattcgctttgacaggaggctcagactgtgtgtgtggtaatacgatgcccccagacagtgccaaagtttcaagcgacaaatgcaacaaatcctgcagtggctggcctgatgatatgtgtatgtctatgcccctccttcatcggtctcaaagaattgacttgctaacgaaattctataggcggtggtaccggctactactctgtctataccaccaatttggaagacgacgttcccacgtactctgaatccgggtccacgaccaccacatcaagcacgagctcgagcagtaccagcagcaaaacgacgacgcaaaccgatgggtctacaactgctcccactactagtagtagtattagtgaagttaccgaaaccgccacatctgagcctaccacgagcggtctctctgaagaggatatcaatgaacagtcctccaagggcaagaatactgccgcgattgcggccggagtcgtaatcggagtggtcggattcgctgctctctgtggtgctgtcttcttctggtggcgatccaagaagaacagggtcggtgctgtgggtggggttcctggcggctatggccgtgactctggcccgccctcgatgtccgattctcgcttcgatggcgactacatggctcagcgccgccaaagcaatggcagcatcgatgatgaccatgacttctctcgtcggatcttgcaggtacacacgtacaacgcctaaaagcattgtttcgaagctgacttgtgtcacaggtgacaaaccctgatcgttaaaccaatacccatttccgaaccattcatgctcccccccctttattctttctacttggtattagcgaaacccaatgtcatttctatctcggtcgcactactttatgagagcttcttatcctgttgtcattgtttttttgtcgggttattcagcggagttatgatatccgaacggcatatggcttgatccgagtcgtccccagctggtgacctgtgtctgagtttcttttaccaatccgttccatgactgctccatagacaacgttgccctacctgtccagcacctcttattgtctacattgggaaaacaaccgcaccatcggccttctctgccgaagacccggtcattgtatcttgttcaatcaaggtgaagtctctgatatagagacgagttcgaaaaggcgtttcattttatttcaacttgaatgctcgacttttttttttctttttatgagcaaaccattcctttatgtgactctttttttttacttttttttccccatgtggtctcttttcctatttccagtcagatctttgcccgtcggtcctataatgagcttctcgcgttctgcaattcgctccggtctgatctgattcaaggataggtggctgtagataggcgagaccattcagctgtacttaatgtgagaatcgatatgcacatcagtctacggtcatttgcttgtaaactagaactaaagtgatttcaattggtcgaagctgggtttgccgttagttcatatgtatgtcttggatatatctgagtgttttagtgtttattcaatcagtatatttgcattgatcatcttttaatgtctcaactggttcacttcctatgggcctagcgatcctagttcgtaaattgatataatcaggtcctaagtcaactatatattgtgacatcaccttcaacccggaaggtttatcgccttggattaagtcatgcgcctcactttagacttagattctaagaggcaatgaataatgagaactcattacaaagtacaagagaccgaggcagaactccaaatttattcagtatgggagctcaatatcaaatagatcccccaaaatgcatgtaccaccgcacatcgcaaaccatcatcgaaagcctcaacggaggcaacggctcacgaagatcacctgaagagaaaatgagaaaagatcgagacaaaaaactacacccttacttacagcagaggaatagccaaaggaaatgccgccatcatgtccttgtaccagcgagcgatgttgggatcgctgtggtcatacttctcccgaatcagcgcctcgatggtttgcttgagcgcgaggacttcgatgtaccaaggcagggcaaactgggtctcgagacggaggtactggcgagccgcatgctcgaattggacgagcttcggatgcggcgtgccatcgctccggagaccaagcgaagacggagcctggaaagacgcatgctggtgggtacaatattgagtgtatgccgccatatctgcctaaacccctcgaaatgtaagtggatattgtacgaaaagagcgatgaaacttacggcatctccaccatgccggcccgcgaggctgtgggccttgccgtgggatttgatcagacaatcgagagccgagcagaggtctcgaaccgcccctgcaacggcgttgacaatctcgatgtcgtgtactaagcccacatcctcgcctttgccaatcccggattcctcgttgatccagatctcctggacccattccagcaatgcctgaagttcgaacccgtggccccggatgccttcgtaaggctagaaagaagtattctagatgagtacatacacgactgaatgacaagagatcctcaaagaatacccacaagttcacacctatggcgggcatggcagcatctttggcaacgcttcgaggtgactggatcgcgaatgcagttcaccttgaagggttgaccccacttcgtctcgtcccaggcacgcagtgataccctgaagcagtggatacaccaccccgtctctgcgggaaaagggtattcgagaagttgcgggtcaaaacccagactcgctagtgtttcagcaggtgttttcggaagcatgatgaagaaatgtctttaatggagaaaaaatgacattgaagcaggatgcagaggtgaagaagagaagacaggaaagtgaaagaatgaaaagatcagtctcgaggtaaacaaaccttgaaaggtaaacaaagcaaacacattagatgagtctgatattcctttgatgttttcttggaaggagcaaacgagaaagaaacgctccttccttttccttccatcctaaatgaggttattcgatcaccgctcttgcctagaaatgtctgggcatagaacagtccagttcagtctgtttttggaccgaaccatacagctgagataagaggaaaccctctagctacccttcgctaatgcctacaaaccatctctcacttccccatgatatcaggaaagagatacacacagacctcaagccacataggctataactgccagctggctagccccaacaatagccaacaacctagtccataacacagcctcgcccccaacttactcgttgagatccatggtcccagtaggccaacgccggacccaacagcggctgacagccacatggcttcatgcgacgctaatctagcgacgaactagatatgcaggagagagaaaagagaccgaaggattccagtcatgctggtctcgttggtagactgtggcagctgataaatcgagcgtgttggcgagttagcctttgcccaacgaaggatggagtatttcccgttggggctgaaaattagccgctcaagatattggacgcagactaggctgaaaagagtaggacactaatcgaatgagctgtttttgatctagttgacatgcatcaaagcctgagattgccactactctttgccaacttccctcctcggtacagtcctccgtgcatggtcacatatttctgctcctacctcatgtcagatatttctacatatgcggaggtgccgtagattatacagactcgaacaggcgcggatcaatatgaaatataaatatacaccgtatactgcatcttaaaaaggtccactccatacaacatagagggcaatcatagcacgctagccattcctattctcagcccgcttcaatcggacaattatacagtcaccccaagactgcaggacaattagccaatcaaaattgcagcaaaaccaacagcgtcaccaagcatgactagcagatgcacgctggcgccctgaacaccgggtgcgcatgatgtcatgcaggtagtgtctatggctatgcaaagctagactcgagcgcatctagacagggtaatatgaccccgattggcttaaggcttgttgttggttgttagtagttccagaatagcaattcctccgcgaactataaaaagacggtgtattgttccctaattagctttgtgaggtggtatcctagcagccatgctagttgctagtctaggtacttgcatgttgggaagactaaaacggtatagtattgcgcttagtgtgatgctctctaagcaacctagttacccaagcaagccaaattaactacccagtgggagtactcacccgttgagtgatctgcaaaggcccacagcttttggccatgtggtatcgacggaagagagcgggaatcagccccgttcgcatatcggaaattgtgactctccgtgcggagtatagcgaaagaaccgtatagggaaatgagaaaaggggtaatcgggagaatcgagatggacaatatatattgtagatctatttgacccatactaagcactgtaatgtcggagtaactagataaatgcatctcaaggtctttttttcagggttagctcgttcaaacccctttgttgtgcaggtcggcgtttgctttcggcttagagttacattttctatctatctatctacaacatggcaattacaggtactactccataactgggagatgaaagtaccgacatattactagattacaaaagtacctggtagtattttgcgttaattcgctagcatagacggataatttaaccatcaccgagccgatatattatgtactctgtacggcgtgtgatagtgtagtcaactagctaatggttagttaatggttctaaacaagaatatatattatatcattgcttcgcttcgctccgcaacaaaatatgcgcacgagcactttctctaaccactgacatgtttgtccacggacacggtaacgggaacgcagatgaaacagacacagtcgcctattcctgttctagttaacagtccagtacaaattatctggaattagctagtggctatcatctcatgcacacgctgcagtagtgctgcagtagtgcctgcatggttacgtgccctaaattagctcgcatttcttttccttttccagccacatgggctacggctcggccgtacgggtactgagtacaaagtactatgcatttatatttgatttgctcgaatcaaaagagattgttttcttttttttaaaaggaagagtaaaaccaataatttattgaaataaactcatatcgctatacataatttcccgagagattccacctgcatgaagtatgtatggggatcataatggcagtgctatgccattatattatattaaataaccccaaaagaacgatcattaccagatataggcattggtggtcaggcactcgaaactcgaaatctgcctcgcaagcatggccacatggcatggtctgatcgacgggtctatctgaaacgggatcgaaatggcccaggacctgcaggggcatgccattagcgcaggcttgcaaaggtgtaaatgtcgaaaaagcaatgctatgccgaagctcctatgaaaggagaaaatgagtatttattctaattcttccgacttcggtaaaccgttgctccacttagagtccagactcgacgctcttcctttttttagtatgttagagaattgctacgatcggagcccttgtggggaaataccccagaaacaggaaatttacgtagattccttgatgacgatgtatagaatgtcagtaactatagcatcctggcaacactaggcgtggcagatctcgggacatgaataaggggattgtcgagcgtgcaggtgacgagtcatgttctcgtcatctcttcggttaatccctgaatgatccctgcaagtgtgctgtatgcggtatggctcgttttggtcaagacaggggaacccgcttggaagacaaattgcctcactaacgatcgccagtgacgatggagcaaaaaacattgatagatagcgacgatctgctggacaggactggaccgtgcagatcgatcacactttttctggcctacgaagtccatattgagacccgctgcattggcgataatcgcgatcattattgtggagctattgaccagcacctggcagagagaaaactcgattcaccaacgtgaacagcaacagaagatcgagatcatagggataatggcgatgctagtgggggtaatcgtatagccgagtggacctgacctaaccggattcacataatgcacatccgcgcttacaatcgaattctagcatttggtgccccttccacgtgggcgcagtcaatcaccagaccctagcaggtatcggaatctacggagtttgaaggggtaaccttgctacataactctaagaggaaagctcgggtatagccgatgtctcctatctctttcggccaatcccaagcgagggaggtccaggtagttcaaccgggacatcgggaatagccgtacaacatacggagtaattccgacggtaaacagtaacttcggctatttatcccggaacagggggacggaggacggagacggagtatagcaaatgtcctgcgctgattcgaacccgatgcacccgggttacagggccactttcttgcgagttattaagtcacaatataactacagagcgtttagggaccgccaagactcggagcggttcgatcaaacgaatcagaaataatagcacttctaccaatcagaaaaataccctagatctgaggtgagattcgtcttccatggaatactccatgatgcctatgatgtacataactgactagttagttagcacgtccctcttatatcattgtacaagccttatccgtaacattgccacttcgctccttcaatgcttaaccatcctgagaatcgtgcgatccaccattacgggaggttaaaaggggagcttcagattcaccgattaacatgctactctcggtcccggaagggccacctcttggccaaagtgagctgattgaaattaaagagcctcgaaagcttagggggccgagtggggacgcatacacgctgctatattccgagtccaaatcggtcatttctcatctcccttctgtccagatcgaagtcgtccaaatgaaatattaacttttcaagggacgtactctaacttgggtgcgcccatatcgattcaaaggctctcaacatgggcgcacgttgcggatacatactctaatttaatctaatacacttcgaattgtgccacagtgtgaattgctactccatacttcgtacccgcaaattagtttcgggtgctattttgtcgatcaggaacgaatgagggagggcgtaatacgtataactatgcactccatacacagttatcaagtggctgtgtttatatctctaccacaacggtagtataagaatacgaagtatgaaaaggtactccgtagactagcgtgcatggcctggcgtaggtcccgcgtggacggagtaagcatctaaaaaaagaaccaacatcaaaccgacctctctgactggctcgtttcacaaagtatagtcacatagtcaattgtatgttgcatgcctttcttcgtgttctgcatggcagccggtactattgtaagcaaggcttattcagagtaatcttcatgttcaagaaaaaaatggctattcatagattttagatacctagatcttccgaagactggcagctcatgcgaatactatcaatgcagcatcatcccacctgggcatacataccccatattatctaaatccctcaaatgtggctgttgacatcatctaaacgacaatggccgacgatcccaacagcgctacgaaagaataagcgctgttagatttttacatacaaaggtgagttggcgacaccatcctaagatttgaagcctccatgatctacacagacgctaacagccacgagccatgggaaattgcaagcacagcggaaaatagcgcgaaacagatcgcaagcatagaattaattccctcttaaaaagaccgattggtccataattgcacacttccatattaataccgggtccctctacaccaaaaacggcctagatcaagattatgcacaacaaggctgtgagcgcaactaagtaacgacgatcgctagggcccaaaaaaggaaaagaaaaaaagtccaattacacaaaaccccaggctaagcccgctttctggccctagccgcagcagccgaccaaacatggccaagacccactcttggctacagtgggagcatgttgtatagggcagggcacgaaggagaggcagggatgcatcatgcgtgtctaaacttggaacctgggaaaaattaaacgagaggctgtggtatagttcccgcatgctgcatatgtgcctcgttctggtttgggtccgtctatatccagttatggaactcgtttcaagatccctgtaaaactgccttgcgatcatgattctcatcgtggatcctggtaatccgtgatctgcaacaatgtacggtggatcgtgcgagaagaacttctatatttctctccacagttacctagtgcccgtgatctgtctgatcggtccgtataacataggtagatggtggtatatactagtgacgggcgtcagcacgggacgtattttagcctggaatgatccttcgaggattcctgcataatgtgcactcccgctcgttattttagtctattgttccttgtttttagggatgtgcttggcggaaaggatcttggaaatttagagaagcagggatagttagaggtagcgtgttttaatgtatattcagaattaaatttgctatagatagcgtattaagttcctgatgcttgccctgccacgagggtgacaggggacctattctccggtcctgcatgcggtggcgtgcagggtaacttagtcccggtgttgggtccccgggacaaagatggtgtgtatgaggattcatatccttatactccggatgtaaatcaatacgaccttgacaatatggtgggaagcaaatagttccccacgaaccctgacgttttgaaatcggagcccggagttctaaggtatccgtcccctcccccaagagtcaaggatcggcgcgctgaaacaaaagcgcaaaccttggaaacgaccaaatgccaagacccagccaaggtccccggggccctctttctttttcttttctttttttcttttgccctttcccttttgggtctagtggatccggtctagttcggttcaactgacctcaagtttggttgaggctttggtcgaatccatggatccaccgctcccgttctggttgaggtcatatctgacatttgaaaaagtacctcttcgctgtatatcgtggagcgacaaaagattaagagtatcaaagtcttattttctataattggactgtattcctaattcagaatatcccccgctagtccagtcgatatcgatccagccctgtcccgagcctcttacacccccttttcggaatagcgcgaattctgggtctgcgagttgcccgaatcagcgcacgccccactgatatttatgtcccttagcttggatggagcaaacccgttacattccgtggaagcttggactcgcagcctcgggtcctccacgttgacaggatttggaatatcagagccattttagcggctttcatacatgggatgatttgaaatcattgagcttattctagctattcatgaatggatacggagtactccgtattactttaatcctaaacgctaattcacggtacttccattgacggtagccaaattgcgcatctctagcacagccatattccaatttcttattatcaaagggcggttgcaaagcctcagccgcactcaggttcttatgcaatgctgtgtaaatttagtacgcttatgctctgatcatcccgcagagcgatcatcgcctccacgcccgtgctgtttccctggatctaatctcagttagccctagttgccttagttcgccttagttcgccttagttcttatgttggatttattttggttggaattattattagcttggatattgcgattaattgtttttattttattgtttttttattttggatattaatttccaattcgctcaaagtttattaatcctcgtagatcgtaggaacagtgtatatcagtccactctcttctcttcctcgtctcttctcttctttcaatattctctgcgtcttacatctcatccataccagcctcatatctatcctatcattcccctttcatacttacccactccacttacattctattctccaacacatcatggctcggaaatctacagggcgcatcagtccaaagcacatcgtctctgtcttgaactcgcctgccgtttcctcctcttcgccagaaccccgtcaactagcggcttccaacgtggtgcgccggaagaagaacattcgtccaaacttggcagatgcgactattcctgtaacctatacaccaaccacccatcgcatcagcaaggccaagaagggaaaacgtgtacatgcctgccaatacccagcatgcggaaaggtcagcacaatcatcttcacctatcaaacatcaaactgactccattgcaggtcttcaccagggcagagcaccgaagacgccatgagttgaaccacaaccccgaggcatcgtaccgctgcgcaacagaaggatgcaacaaggcatttcaccgcgctgatctgcttgtgcgccacatggagagacagtgagtaccttgggaattggctacatggcgcatactaacaaccatggcagtgaactcgaatcgaaatcagaaaagtcctcattggcacccaaccccatcaccgagtcccctgtctcgccctgtatgtcaatggaccacggaattccattggctgcaacctcccattcacactccatgtccatcggcgcactcgtggctcctggcatccatccggatcttgccaacaacgactgctcattactgtggagcggcatcgaattgcccctacagccccgcccggctttccacagccagctgcccgagtctgtcgacgacagcccgttctattcttcccccgcagagacctgcccctcgcctctgtcggatgcgactttttctcttcctccatactcgagctcctccatctcttccgctgggtctgtcatcgaccagtacccgagcaatatcgtgaagagcgagctcacttcgtccccgcttcagatgcacactccgctccgttggagtactgagggtggcatgcctccgtcggacctggtccccatgtctatgggggagaacatgatccagcctgttcagtgccactatccctctccttcgtggtccagcgcagactgccttccatacgatgaccaggtccattccatgcaccagttccagccggtgagctgggccatgtgaaaagatcgaagctatttggtcaaacattgactgtagatggctgaatatctgacgactacacgaccaccgcatttcccttcatacgaaaccggcacgatccagccccagaaaaccttgaactccatgacaaagacaacaggtgtgggtccaaggaacgggaggcccggtgtggtctcgactccctacaaatggctcaaccgtcattagcagggctctccactgactccattgttgcccggaatgtgaccgcctggaggatcgcctggacttcgggtccgtcggtcaccgccgcttacaccacgcggccacaaaataaaagcccaaagaagataagctaatttgccgatatcggctggttaattccttagtctggcgtccagagacaaactgggcattagactggaagttttttctcttctttgtttaacgttttccttatgtgagatttccgacgacatgatcatgattgcttgtttttcttttctcatttgtctacctaactactacaccattatacccctacaggccattcaatgtacctcgaaactcgttccaagctgatcttcatactcctacaaaagtaaagctcaaattcaacaaaataataaccccgatataaagttcaactctattaaacaaccacccatggttcggccggccgtcacaaaacccgtaaaacgcaagcgagataagcgatctccgatcggagcggaaatatcttccacagagtcgaagccgtcgggataaactccgcttatgtaagggcggaaccggaacaaagcgaccctcccccttccttccttcattcacctggggcaacgcaatgacaaggcaacctgagagactcggagcttccaaccactcaaattccttctcggccgtaagttggacagcgtacattatctccgggtagccttgggccctaccttacaacgaattgtagcttacccttcggacgaaaagacttggctacctccacctttagtcccgcaatacccgcaacacccagcctattctcaatgaggtatacggacctcttcgcgctagacttgttctgggttgaggggggaatatcgttatttggatgggcggggggtggccgcttatatttgtaatcttttttagttatcttgagagttagttaactagttagttaactatgtattgtgggtttttggatgagatctggatggtcttgaggtggggagttgagggttggttttcgactgatttataactacggagtacggaatacggaatacggagtacttatattgactatctaatgtattgattggccttgtatccattgtctcttgtcatgttgtatacattcttcatgtacttttctccccgatggagtgagtaagtgagtgagcgagtgcttcgtacggagtacactactctccgctccgtaggtactccggataacggagtagaggaactagagctctcgactcggctgtggggcatgttaggctggcgtgtcgatcaggggttctcgggggtgtcacgcggcttttcgaggccggggctttcgttcagacctgcctgcttgagtggtggtgtggatttgctatttgtttggattcttggattcggtgtgttgggcatgattgttgtggggtgtgaagtggtcttgtggtggattgctgtatgctgacgcagttgtacattgggaggggagtgatggctgcttatactgtagggacaaagattgcatcgggcttatagttgtgggccagaagcaatttttgactcgtgttgtagtcatctttatctgaaagtagacagaaggctgcatattcattggtgtagtcctatgaggacgttccaaggaacagaaacaaagagaaagtaaaaagcaggacttcttgatagctgattactttgaccatgtacgatacatagtatgcaaataaatttgatccatcattctcaacgattccctacaacatagggaacgccatcccatcgcctcgaggatcactgcccgcagcataaaccagcttcccatcatcatagtacgaacggatgatctggccgcgaccaaacatagcccgcttccaacctttcaaaacctcaatcttgtgaccaagacgacgcagtccctccacggcagcatcactaataccctcctcaacccagatcgtgcggtcagtactctcctcattcggtgcagcaatacagaagcgcggggaatcaagcgctgcctggggatgatacccgaaggcaagcatgttgagcataacctgcacatggccctgcggctgcataaagccacccatgacaccataaacggaatgtaaggagccatcggcgatattagtgataagggcagggatgatagtgtgatatggccgcttgcgcggagctaggacattagggtggccttcctgcagcgaaaaattggcaccacggttctgcagcgtgaagccacagccagcagggataatggccgttccgaacccggcatagttactgttgatgaaagagatgccgttgccttcgcggtccgtcactgcgaaatacaccgtgtcgcagtgattgtgtgctggactgccgtggtccaggatatccgctgcgtgctcgggtttgaatagcttcgcccgctctgcgaggtaagccggatcgagtaggccctgcgaaggtacgcgctccacgtctggatctgtgacccaccaggctgcgtcggcgaaggcgatgcgcagactctcaatcacggcgtgtaggtattcggctgagttatgctgggcctcggtgaacttggggatcttgcctgctttctcgagttcctccatgatgcccagtgccattagcgccacaatgccctggccatttggtgggtgctcccagatctcaacacccttgttggcttcgccatctgtgccggatgttgattttgagacgatatcctggccggtgaacttgagtgaaatcgcatcgacttcctgcgacccgacttcggcgtgataggctagatcctcgagtgacatgtagccgcccagatcttgcaccacctttacgatggcttccgcgatccggccctggtagaatcctttcttaccatctgcagcgagcgcacggaaggtcttggccagagtgggattcttcatgatctcgccgggaagcggggctcgcacgccatctttggctgaaggatcgactttcaacatctcacggaagtttggagatgcattgcggatttccttctcagaaacattccactgcgcggggttagttgatggtgcgattgcgatggaatttaatacttacgccctttgacgaaagctccgacaccgggaacccctcctctcccagctcaatagcaggctgtagaatctgctcgagcgataacttaccactaccaaacttctcaactgtatccacccatcccgcagccgctccaggcgtggtcacagatagagcattcaacatgggcatgttgcccggctcaccaggggccagaccgaggtccttgcggactttctccaagctggcattaccaggataccgaccagagccattgagcgcatgtaccttcttcgtcttggcattgtagaagagacagaacatgtcacctccgataccggtagagccaggctcagtcatgttaagtccggcggctgttgaagcatgagatcagttcattgtttcctgttgtgattctgcaactcgaggcgaggcttacccacggcaacagcagcatcctgggcaagagaataagtcagtattgttgaagttgaatatgacacgtagaatggaacgatgtacataccgctgcatttccgccctggctcaggatcttatggcctgcagccgcggctagtggttgagtgcatgatacgatgcccttggtgctgtggacggtactccgtcgactgggaaatgggacatagtccgcattggagcgcgaatatacggcttttgcgttgagcggcatgacttggatgatgaccccagggagaagtgggagagcgggggatatgaggggatatcagacgcttatcaaccccactaatttccccgggctgtcgcgaatgataagaacagtgaggttttgcgaattggggaaagttgttgactccaaattggactttataattactaaataactactctgtaacgtaactacctagttaactacttcgtacctaagtacggagtaaataacactcactatatatatagggtactcttacccgattaggaaaggccttagcttatgtacatatacctggtagttcggccgaggttagctagcaagggtatacacatatcgttccatcgttctatcattgttctttccacatactttgtatcatcagagacctcaattctgaaacaaaaacagacatgatcacgtaactcaccgccccgacttcggagcggcaattaatccttcgttccgccatcatcccgccattgaatttcctatgacgcttgtcttgtctgatgaaactgatcttgagaaaggcctctgatggagcagcatggtggtatttgtcgacctcgatgattcattcgctgacggatcggcattcttggagaagccataccctttgattgctgaccccaacacggagtcagccgaactacccacgtcgcatacttccccgaataaaaagaccgatgagatcttaaaccccaatcggaatggattctccgcggctttgagttgttatccgtatgtctttgtttgtcaacagccagcaaataataagaaacagaccccactaacagttcgccccatagcattgtcaaggaaatcgctcgcgctatcgacttgaataccctctacgccctctcgaatacatgtcgtcagttccatctgaacttggcaccgtttcgccagcaattagcgagagagaccctccggtgcgacaatgaatacatcgaaaccctagcagagatgctagacagcggcgctgtcctcccagacagtgtcaaatcagtcatacgactactgagccgtcccggcggcgagcatatccgcatgacccgcgggaaggtgggcaaatgcgcgcgcgacatggtgggcgaatgtcgacgctgcgccaaggttgtatgcagagtaagccaaatccgcccccccgcctaacaaataccagtcgctaaacccagctggcagaattgcacaatcaaacccccttcccagccagcccttaaaaaccgtatccgccgcctctgccgaacctgcggcacagcgccgctctccgcccacctctcccacacaagctcggacccgcacacccccgacccgtttgatgagaacagcgtcgcggctattgcgttcgcgcgcaacccttgtaattgtgaggaagctgtctggctgtgcacgcagtgcggaatgacattgcgcactaatgacacgacataccgtcgtgtctgggcgtggcgcacgcgctacagcacgtacctcggcggcgggttgggtactgacattggtgaaggctgccaaggggtcaagtgcgggcgtggtgagaactgtcttgctgcgcaggagattgagcttgaggtcgactgcgaggctgatgaagggtctgggtctgggagtgacactagcagtactgtacagagtcctgctcctccgtcgtttggttatgaaggaattggtatctcgatggacagccatgacgatgaggagcccggatattgcaggcaggaaatcattgggttgggtggtgttgttaagcataagtctaagaagagagtcaatgttggtgcatgtgttgttgagtatgaggacgagagggagacagggaattatcttgagagggaggagaagggtttgtatcgtggttggtgtgggtggtgttctagagtaattccggcgaagaacgagcagacttgattgattttgctacttatgactgtctgctttagggctttgcatgttgcatgctgcatttgatgcttcggcgacttttttattacgactgatgctggtgaagctttgcattaaatgacatatatcatgacccatgatacggggtcgcttggacagatgctacgatgacctcaagatagctatgcgagatgtgtaaatgacgatatcacaaatcaaaaaccttgtcaagttgatgcatattcaattaaatcttgctaataagaaacaattcaagtactcctgcaatgattcgccccccaatgcaagcacaaatccatcaagcatacaatgtcatcaagcatacaatgtcacatgcagatcgtttcgttaaagtaaaagacaaggttggaagtgaaaaggtgcaaaaaatccgtatggtctcaatgggcagcaatcgttctccagatagtcttgagcctcgactcctctcgaggaggtgattcctcgcgcctgtggcgacgatgagagcgttcctctcttgactccctggaacgccgggaggcgccctcaggcctcttctcccgctccctctccgtatcaccttcaatttcccgttcacgtgcgtgctcatgcgcacgctcatgcttctctcgatctctctccctctctcgctctttctccttctctcttcctttcctctcttccctagatcgaccgtgctctcggccgtgctctcgaccgtgttcagtcgagtgtcgcactctcctgctctcagtgcgctcaacacgctcactgcgaggatgctcctcttcgcgtcgtgaccgtgatccactagaccgaccagcagactgaccctcctcatactccgcccgatcgtgacggctgccactgctatgacttggcgatgatcggcgcggattttcaatcggcggtgcagccttggtggcatttaggcgcagcaaaggcccattggtatccgacttgccttccgtcatgtatcgcaggaaggcacggggcttgggcgtcggtagcgatgttgatacctgcttcggtgaagaagtcctggctgagcgggctcgttcgagagggctcgagggagtatcggaggtgcggcgtttggatctgtgctcgatgacttcggcctccatttctggttccattgctctctcctgctccttcgccttctccttggacgagctcttcgagcgtttcagtttgtcaggggcggggatgccgctgcgctctcgttcctcggcaagagcgcgctgctttcgttgcaactgggatttctcatcatgttggcgtcgtgcttcttccagcgctttggcccagcggttggtgaagatgcctcgttcgctcttctggcgctggagttgatcccggtggccgtcggatgatgtcttagaatgccgacgctctccctcgatcggtgaactgcgctttctgcggcgtcggctgtggcgggctgctgcggcttctgcgctttcgtcgagaggctcggcatcgatcatctccacctcaggctgggagtctcctgggggtggtacgagctcgtcgggcgccacttcgtcgctatcgggaacagtgactggctcccgggtagcttctggttctgctggtgggtcttcagcggggaggtctctggcagcctctggctcagggattggctcctctagcggtgtctcaggcattgcctcttccggcgttggagtctcggctgggactgcagctgcggcctctggtgtctcagctggggcctcgtccggaacaactgtttcagccaagggttcctcaggtgctgggatctcagctggggcagcttcgacaggagctggctcttcgggggttggctcatcagcaggtgcttcctctggaatctcctttggtacctcatcgggtacgacttccggttctgctacgggttctgtaggtgtctcggtagcgggcgcttcttccactggtgtctcttccactggggcgggagcaggtgcctcctcaactgctggttctgggacaggagtctcctctacagcagcggggacatcttcggtcacttctttcacttcagcggcaggctcttcagcagctgcaggttcaggctcagcgggagtttcagcagcaggctcagtgggctcagcaggggcttcaacaacaggctcaggctcaggttcagcagcaggttcaggctcagcagcaggctcaggctcaacaggctcgggagtgggctcaacaggagcttcaacaacaggctcaggttcaggttcagcagcgggctcgggagtaggctcagcagcaggttcaggctcagcagcaggttcaggctcagcagcaggttcaggctcagcagcaggttcaggctcagcagcaggttcaggctcagcagcaggttcaggctcagcagcaggttcaggctcagcagcgggctcgggaataggctcagcagcaggctcaggctcaacaggctcgggagtgggctcaacaggagcttcaacaacaggctcgggagtaggttcagcagcaggctcaggttcggcaggagcttcaggctcagcagcaggctcgggagtgggctcgggagcgggctcaacaggagcttcaacaacaggctcgggggtaggttcagcagcagtttcgagttcagcagcgggttcgggagtaggatcggcaggagtgctttcttcgactggtgcctctttgggagtttcctcgactgtttcgggctctacagcttccaccttgccctccgcagcagcttcaggttcggcagcaggtgttccctcaactggtggttccttgacaggttcttccggagcctcttcctcttctgctgctggtgcctccgttgtttcaggtgatggttcagcctccggcgttgactctaccgctagctctggctcggcggctgattctggttcaggcgttagctctgccgctggttcgacagctggttcgggttccggcgttggctctggatcagctgccttagcggccttccccttcttgcccttctttttcttactcttacccgctgccttttcctctgcaggtggctcctccgagggtggctcctctatgggtggctcggctgctgctggctcttctggagctggggcatcaggaggattatctacgggctttnnnnnnnnnnnnnnnnnnnncgctggctctgccgctggctctggctcggcggctggttcgggttccggcgttggctctggatcagctgccttagcacccttgcctttcttgcccttctttttcttgcccttacccgctgatttctcctctagctttggctcatctacggatggctcgtctgccgttggctctgctggggctgggacatcagggggattatctgcaggcttttcgggctcggcgtctggctcctctgtgggtggctcggctgctgctggctcttctggagcaggggcatcaggagaattatctgtgggcttgtcgggttcagcttcaggccccggcgctttttcggcggctggttcgggcgctggctctggatctgccactggctccggctccggctccggctctggctctggcgctggctctggcgctggcgctgggtcggccgctggttcgggttcgggcgttggctctggatcagctgccttagcggccttccccttcttgcccttctttttcttactcttacccgttgccttttcctctgcaggtggctnnnnnnnnnnnnnnnnnnnnnnnnnnnnnnnnnnnnnnnnnnnnnnnnnnnnnnnnnnnnnnnnnnnnnnnnnnnnnnnnnnnnnnnnnnnnnnnnnnnnnnnnnnnnnnnnnnnnnnnnnnnnnnnnnnnnnnnnnnnnnnnnnnnnnnnnnnnnnnnnnnnnnnnnnnnnnnnnnnnnnnnnnnnnnnnnnnnnnnnnnnnnnnnnnnnnnnnnnttgcatcggctgatggttgatcttccgttttagcctctgggtttgactctgctggagtttcggcagcctctgcaggtgtttcatcggcctttggtgcatcttccccattctctagagcgtcttcggcggccgctttagcatcagcctctttctcggctgctactgtctcaggatctacatcaagatcaagatctgggaaagcttcgtctacatactgtcagctttgtaaggactaaggtaaatttgaacactgaccatcgttgccgttatcgcctgcttttttcgtgtcgtcgcctgctggagcatcttctccaccttcgagttttgcatctccttcggattttgcgttctcttcagacttcgcactatcgccaggcgctgcatcgtctccgggttttgagtcgccttcagactttgggtcttcttcagactttgggtcttcttcagactttggatcttcttcagactttggatcttcttcagactttgggtcttcttcagactttggatcttcttcagactttggatcttcttcagactttggatcttcttcagactttggatcttcttcagactttggatcttcttcagactttgggtcttcttcagactttggatcttcttcagactttggatcttcttcaggctttgcttcctcttcagtttttgtatcgccttcgggtgctgcaccatcagcaggtttagcatcctctgcgggtgtcgcatcttctacggcagcctccttagaagcctcgtcgggatttcctgcatccggtgctggctcatccttgccctcttctttagattctgaggcaggttcgtcgggttgagactcggctggtgcggcctctactgaatctgagaaaattgcgagttaatatcaagtacaaaaggtagaaaatgaacctcatctatagaaacctgaggctgtacttacctgtgggctcagcggctgcgctatcatctccacttggctcagcggagggatcttcagaggcagggtccttctccggttcggcggtttcgggctccttgttgtcctggttttggccctcggtcagatcggtcgttgaataggtgacagggtaaaaatggaaagaattagtctcatagtcaaaggtcgtatattgacgttcaaccgatgcatatgagaactcagggatctcggcatacttgaaagccatcttcaacagcggctgctgccgggtccagggcagagtctttattctcgagttcagggggtggcgcggaaccggcgggagaacgattgttattattcttattgttcttcgtcttcttcttcttgggtgccattatacccggtcaatgacgtatcatatatcgaggcctaggcgaggctgactggcgcgtgatgtgacgagaaccgggacaataggaaattgacaagtcggcttgtcgggctcgacacacggaaaggaatggggcagcaagggaaatcgaggaacaaaaggtacaaaggatggacaattgagagagtgaaactgggtagggtacctcatgtattagagtactaaaatggaaaagaaggatatgcttgtttctctggtgacacagaggtcgcattggatagtcatggtgaggcgacgtatagtagttcgtctcatatgcggtcggatgggacgacaacaaagtgcattacggtcttgggccctgaacgtcaccaatgaactggccgatagagccaattgtcattgggccacgttggtcgtcgggtctccatttccaggagtgaggtccggtgcttgattagggccgggtgagagcagtacgctccccacccgcggaaatacctgcagcaccaaggagtaaatggtgagatgggattggaaatcgcggggcagatcggtcaaaataggaaaaacagtactgcaggatcgagaaaacgggtctgttgaagtggggtggacgccatggaatgaattggtttgaaatgaatttgaattgttttggtttcgtttgcttttgggcctggatactacacactgagatgagaaatatgaattgggccgagggaacttggccgctgtacacaaagccacgaaggcaatgtttcaataggaaaaccgatgggcgacgcagaggtgatgcaggccaggcccatttctgcccaacgtgttccggtagacgcggcaaatacgatgcaggcgtagtacaccgcgggtggggagaccagggcaattaaccttcaaaaggatccggtattaggggcaaatattgggacttctagtacatgttttgcatgactggtagattcgaatcggagatgcgaaacggggtggttggggcgattgagattgtacggggctaataatggagtcgtggatactctcgtggatagttgaatctccactctcgacaccgacacttcagagtattgtccgagctcttttccggggacatcattctgtaccactcgactgtaagggagtcagcagttgaaatggcgatgtaatatgcagttaaacatcgtggactgcatcaacaaatctttgaagtggaagagagaaaagtggcggaacacgagtttctcgggatcaggtgatattgcgcattggacttggacgtcagattctatgtctctactgtatttccattccacctatgactacagagtacagagtaagagtacagagtatgcagatgcagtccagccgatcattactatcctcgcgtcaataccagccactcctgaaccaacccgtccgccaatcccttccaaggtttttaactttgtctgactaacaatctacaacaagttaactaaccaactaactgcctcactagttacctggtcgacagatcgtcttactttgtacggagtacaacggcttttcaccggggtcctcttctttcaaaatgacatatgtgttcaattcgaccgaaggtactcggtactccgtacctaagagataggtacaaaagccaacaactatcgagtctaaaaagagctgcatgcatgaccagggcacttttgtcttttctagcggattatcctttttgtgcaattaccgatagttatgctgtacttcctaactaatacaagtccttagtcacatcgccagatacggtcacctatgtacccaatgcagcgggccgagcatccatgccgtgttgcgtgtggttagcaaatagcagtctaggtgaacccctcgcatttgtaaatatgattcacatctgattatgatgtcgtttgtttctattcccagaattgggccatgatttttgtgttctgggctcctgggctcttcgactctgtagataggcataaacatcactttctttgccaagctttcctttgccacccaggcacttgaaaggaacatgccgatcggagagggctcgaggttaatagactcttattcgatatctgatattctatatttgatatttgatatcgcatatttgagagacaggctgtttgaagtatagcttagtaaggatgttgccggcatcgaatcttctagagaatgaccggtgtgactaccggcatcatcggatgaattgcttgatcggcaataatggcccatgggaaagcaaccgccaatatcgcttacggagtagaaaagctctgactccacagcgtgactccagcacataatcccctcaactcctctatcccaccggcgatctttgctctccctcacgatagatacatcgaatgttcgctagaagtgctggctagtcaataccatggcgtaatgaagctctgattggttgccttgctttttttcacggtgaattgatacgtgcagtattacggagtagagattgaagtacaacatgtaggtaatagcaacgtcgccagctttatcgtacgcaatcaattgcccctagtgattcaaggactcgagaatgcctggtcgaaaaggtaatggggttgaagtattcacacgcgatgaaaactctgcttaaacacatctcaatacacttcccccattgcttctgactcattcttggcttccatatgtcagcctcaagtcttatccaataggctccaactcttgtcagatacgcctcggcttatttccgatatgaataaccctacaactctggtgcaaggcgacgaatgtagctaagaatatcgcgattttgctttcatatactagtttagaaccaatcctctccttctgtaagttctgctcaaagtccacttccttcaccctgctgtcggattgcctttaggcaatataatcatttctcctcgtctcgaactgtttgccgcagattggctaaattggtttccacgctgttgactacgtcgtccgatgattccgggttccccttcgaaccatcggaatcgagcattgggcgttttgctattcccgcttcgggggtagtatcgcttttgcgcttttgcgctttcggtgggttatcgctcgtttcgggatcccctcagtaggctttgtaagcacgtaccggttctccctaagcagcttgcgcagtattcctggcctgaaaccaaaatatgtgcagtgaacttgccattgtattgctggcagtacacacaagattcctctagggtgttatatgccagatctgtccagaggaaaagagtgcaatttcatccaaactcgaagtacaagagaggacaagaaagagaaactatctgtgtgtcccgccctcccgttttatacgtgtccttcttgtaaactgtgcaaaattcaaatggtggctcttcaagcttatttggatgtagcttgggagagagcgaaagtgcaaatatagcaagtacgttcttcggcaaatgcgttccttttggatcgtcacacaactcacttgcagcttgattgcccagtaattcttctccgctgtcattagcagacagctgaggaatataatgggttctgtcatttctggttgtagtggacggcttaagtccttatatatgtaggactccttggcattatgctccgtcaagcttctagagcagacaacaatatcatccagatatgttggtggcgtttgtctttggtttattgccagcccggtaccttgtcgtctccgaaggctctatatattgggtcgggatatgcggtcccttttcttggctcgtcgggggagaggccgtttcttctaggccatattggagtgactaaaggccttctcgatgagacccagtgtggttactatattcaattagctatatatcccttctactctatgtcttgggttgcgtaccttgcccaagaacttcctcactggggttttgagcttgaagaagagcttataatgctctttagccataatctctgtggcaatgatactttcgctggccgcaccctccgcacccttgctaacaaattgcccgcttcaaattggtacgggctaccaggctgtcggtacgcgagtcaccacattggcacctgtctacctccaacacttccacggcgggtagtggaataactccgcagagatttagcgtcacaacccaatcaatcttttttcggcaatagcaacgagaaagctgtgttagactcggtcgaagttacaaagtctatctgagttacggaattccacgcagttttcgaggtcctttggcacggacagcccgcagtggccaagtgttggacaccgtccgaatttcaaaggtttggattgaccgctcgaagtctgctattggaagttgatatagtggtaaacttataggtattggaagagacgataacctacgaacatctccaggagaagcgccctgaggggtattctttcctccctttgagctgtgtagacggtgtgatccgctgttcgtccttgttcccatatggctacatattagtcctcaccaaagtgaagggagagccgttggagaagagatgggccgatgcatctaccgaatggaaagagttcatctaccggcaggttctgactgctatcagtgcccttcgagatgtgggagttctctgggcggaccctggcccccacgatgtgctttaccacgaggatgacaataagccttctgtgtctgtgatagactttgaacgcttcgagccacttcatcccgggcaactgccccatgccaacccgagatggcggctatctttggcctggaggcctatctcctgagaaattcgtgacgatacccaggaggctagaaagtcgcatgtagatacctagtcgatgtggttcaaggcctgcaccttgctatgagatgataattgaatatccccctgagttttttctcatgatttattgatatatttttctttctgtcaagggcgccggtcattatcatcctttcagttattataacacccaaaagaagatgggaatactcaaagggaactcccaagagtgtttttataaagtccctagatattctcgagccaaaccgtgcatacgataaaaacgatcatgaacgccggagatagaatgcacgagaacgtctacagacacactcttttacttgcgactacggcaggtttttaggtccatcgcgccaaccgggttttcgccgcaaggtatatatgtagtctcttaaaggtctagaaatagctcgtaccaagggtcccctacttacaatatttaggaatagttagcggttatattctaaaagacactaggaaagaccccaaaaaggtgcgatagaaagatgataacaaagtggtcttctctacgggatgtacgagcgatttagatactataggtattttagagtagggcatatatcgtgtataccatgaaaatgagcctgaacgccggagataaaatgcaacctaagtaggagacaacaaaaacaactcatttccgcatgtgttcatccaaagtctttctccacttagggccgttgattctcatcaggaagatgacagagctgcttgcgaaaccgacgaggccgaggatggtgaagatccagccattgccgatagcaccgatgatcggggccgtgacgacagaaccaacgcaggagaagatgtttcgcatgaagttgttgagggctacaccttccgaggattttttcggcatgaattcggtgagcatggtggttaccatgctgaaaatgagcatggaacccataccaaagaagaagttggcaatcatctatcagatagttagcgagtgctactgaggtatcgttgagattaaataagagttgacataccgggacaagccagaagactcccctctccgcggcccaaccataccagatcagggctgccgggtacatgaaggcgccaagccatgcgttctcacgcattcggtcttccggtcgtagtactagtctacctttctcgtcgtatcggtttgccttcctcgcctcccggtgcatgatgctgtccatccatttgcctccaaatatactgctcaccatgtagcccagcgagtttggaatgtatagcaaaccaacgatgatggtagagaagttgtatggctcctctttgaaggtatgctcaacgctgatattgagcacatagagggaaccgaaggcgatgctagcatagtacacactgagcaggacggggaggaatcggaggtagagaatgattttgagcgggtcaatgaagaccatcttcaaagtcttgagataccttgcggttgcccgaacaatctgttgcgacgagactcgactcagcgggcggtcgatatgtagatcttcctcttcaagttcagccagcacaggcttgtgcacggccaacgtctcgggaagggcgaacaagataaagatgagagtgatagcaccaaatgctgaaaggaaccataacgtgctccgccatccccaacgctgggctaggagaccgccgatgatgggtgcaaacaagggtccacacaatggacccaaatagaagatacccatggcccgtcctcgctccctgggttcccagagatctgcgatggtgccagcaccaaccgcctggacagaagcagaggcaccaccactcaacattcgcattaccacaagcatcgcgatagaatccgagatggcgcagaggcaattaaagaccacaaagagagcaaaagaagccaggtagacggtccgtcgcccaagtcgctcgctaaatgatgaccaccacaatgggaatatcgacatggccagcatatacaacgcgatcgacagattagtgatagtggttgtcgtattcaagtcatcggttacttgtgatagtgaagctgatagaatattagagatgatcagatagatacataatttgggattaaagactcacggaggaatatcgcgctacccattggtgctgtggctccagcaagagcgacgacaaatgtgatgaaccatttcattcggcgagggtatgtcttcggattctcaacctctgccaccaatgctaactggccaaacaagcctctgcgcttggatcgggcgacctcgatgggaggaccaagctccgtcaattgacgttctaggcgtggaggattctccaggtcgtcattttcttcctcggcggtattgctggagacacccgaaagggagtgaatgtcattatcaacctcggactttttgtccgctatgattgtcggatgttctccactgtccggggatgcgacgataccgtctggctcagattgcttgttcatattggatgtatgtgaagggaaagaaaggcgactcgtgccaattgaacataaaataaacctgaatcaaaaaaataaggcgcataaagctttataaaagtaaagtcaagtggagtttaacaaaaaacagccctgtgggagccctgcagatagccacttgggcaccgtaaaagcgtcgatctattcccctgatatataagatcagcaggtatgtgtaggcgcaaccttgagtaaattggatgttgttccaggaaaaagtgagagagagaaaaattccgaatgcatttggagagttggagatttgtgaccgacaagcaccgacagcgaccgagagtcataatattatctcttgcactcaagcgcagggtcacagtgcttgattattcgacatcacgctagtccacatgctatcccataaagatacaagccggcttatagagccagtcatcgttgagcgcgaatgtgccggttttccgtcggcaaatcctgaaggtgtctctccgagatagattggagacttgaagcggtctagatggacgtaaactagaatctgggagagaacagatgcaacattctgattgcatcataaagtatttaacagtcgcaatggacttaccttggctttcgcttggtatccctatattgtacttccccggatattaccttgagctgcccaggtgtgtcaataaataccccagagtcatattcttatcgtcatctaccccaccatatacaaggtatattgtagggcagatccaggtgtacttgctatgattatacaaatctgtcgttagaacagagcgtataccaaaaacaacctagaaacatctttgtacgccgcatcgcctatcttcaggtggagggctgctgcaaggaggtgattaataagcttggtgatactggcgatggatcccggaggtcaacatggcataaagacggtgaactccaccacgtccctcttgacaagaattaatcacctgaaaccacagcaaagcccaaatccaacatgaccagcccaacacaaaccaaaatcaacccaaacgaggtacaggcccacctctcccagtacaagggcgataaatacgtcgacggctgggcttccctgtgggacaagggcggcaatctgccatgggaccgaggattccctaatcccgccctggaagacacgctcgtcaatcagcgcccgacaattggcgcgcctatcgccaccgatgcacagggccagtcgtacaggcgcaaggctctcgttcctggctgcgggagaggtgtggatgtcctcttgctggcaagcttcggcttcgatgcttatggcctcgagtatagcgcggctgcgattgatgcgtgcaagaaggaggagaaagataatgccagttggtatcgtgtccgggatcagactattggcacgggaaaggttacttgggttcaaggtgactttttcgatgatgcttggttgcaggagattggtgtcccgttgaatggatttgatattatttatgattacacggtatggattcctcctttcccttgtgtgtctgtctacgttgtgatattcatcgcaaagcgggaatacatccacgtgatttgataccaataattttgtgactatttttgtccatatctcatgttcctatgttcactgttctcaggctaaccattatgcagttcttctgtgccctcgagccgtcaatgcgacccaaatgggcgctccggcacacccagcttctggccccttcgccagcgggtaacttgatctgcctggagttcccccgtcacaaggatccgcaggccccagggcccccatatgcctctccatcggaagcgtatatggcacacctgagccaccccggcgaaaaagttccctacgacgcaaagggtgtcgtcaagcacgaacctctacgggcaccgagcaaagacggcctggaaagagtggcgtattggaagccagagcgcacgcacgaggtaggccagggcgagaacggggtgatccacgaccgaatctcaatctggcgccgtcgtaactagatctgccgaaaggccgaaaggcacctagcaaaaaccgaagacaaaaatagatctgcaattgcacagtcgggtccattgaaaaggccactgaaaaggccaagacagaaatgagatagcattggtctgagtggcttaggacttcttcacaagggcattgtagtgttcgccgagtccgtaggtgtggcggtagtaagcgagccagataacgcgcttgcgcttctcctcctcgtcgaagctgtcgctgtcaccagactcgatcttttccattcgtccatccttctgcacaacatttatttccacaccgtatgctcgggcaatcgcctgtagctccaactgccctccccactcagcggtcaatttaatctttcgagtgtatgactctaggggctcttccatgaacgcctcgaagtcctctttatgttccataatgaaatctgccgtgacagctcgaacagcccggtagccatcgtgttgcggagaggcgactgtgtcgatccgtgactgtgtcgcgggctggaggacgattcggcttgggtccggccgcaagccgagtccggactcgtcgagttgtttggcaactgctgagtagagacagtgcccatccggagtcacttctacttccttcagacccagctttttgaacacagcatccatgacctcctgttcattgcctctgtagttcgtttgcgtcgcggcttcttctgctgcggcggctgactgggcggcttgctcagctgcacgccgcgcgagacgagctttttggcgatttggctttttggaattgggtgtagaagaaggttctggggtaggttcggctgctggttctgctacttgcggctcctcggtggggttgtcttgtttcaagtctccgtcatctgccgcttgatcatcttccagactgaggtctgcgaggtcttcggcgggatctccatttaattgtgcgatctcggcttgttgtttctcggacagatcgcgctgcattcgctcgcattcatcgttgattcctttccgagttttcttggtggcggactttttcttttgcgtgacccgtccttggagatctttttgctctttgcggtgttttgacaaaaggtcttccattgtggaataacgaaacgagaacaaacttcaacaattctattataacgggggtatatgctatgaatgaagacaaccaaaacacctcgaaccccgcggaaccctgacgatgcagccctaagttaaaccccaaagaggactagtgtctgctccacggcataaggatattccaggtccgtgtgccatcgtgtacctcggttgattcatcaagtagtctggcctcggtagtctggggtagggggtaggtgggacagatgtaacaaatatagacttctctctttgatattcttagtgtattaagtctaaatcacaattacacaatggattccgcaagtcttttcaacgtcaaggtcagatcacacgtattctacctctccgaccattctaacgcgctcacagggcaaagtggtgctggtcaccggaggagccaaaggcatcggtcgcatgatctcagagggctatgtaacaaacggtgccaccgtctacatctcgtcgcgtgatgccaaggcatgtgagcaagcagccaaggagctcaatgccctgggcaagggcaaagcctacgcgattccggccaatttctataaactcgaggaagtgaagaggctggccgaggagctaggcaagcgcgaaagcagtaagacaccacatccaatggagaatcatatcatttctgacaagatgtctctttcctagagctacacattctcgtgaacaactccggctcgaactggggcgccccctacgacgaatacccatccgaggccttcacgcgagtcctcaccctcaacctccaccgcgtcttcgatctgacccagctcgtcacacccctcctggagaaagcggctacaccggaggatccttctcgcattatcaatatcggtagcatcgatggactccgtgttccctcgctcgagacattcgcatacacttccagcaaggccggtctgcaccacttgagccgggtgcttgccaaccacctgggcaggcgaaatatcacgtaagtatacattatatgcttcacctctcttcgtttgatgtatcgagaactgattcaatttgcagctctaataccttggcctgtggtccttttgaaagtaagatgatggctgctaccttgaagacattcggtgactctatcaaggctagcgtgcctctgggtcggattggaaccccacaggacgtggccggggcttgcttgttcttgagtagccgtgccggtgcgtttgtgaacggcgcgactatcacactcgacggtgggagtgccgtctctgccaggttgtaagcaatggaggatatctgtaaatagctgtgttagcataagcattattggtgttcctagttagagaggactgaattcgggagagaatccctgacattccaatcaatggctggttaccatattcgtccaagggacaatcttgttatgagtcactaccccagagatttgcaaaattcatattcgcctttttatacatcgcacctcaagagtctcgccttcaaattgttatctcaaggcttatcaggcctggagcggcgacataagtggagcggcgacatcatcaatgggaatgcgtcattgcctttccacctctgccaggcccaaaacatatctttctatcaagttccccatcagtaccatctcgcatctattctcaagcttcatcaacacattacttgcatctgaaatcgtcttaatcgccgaacaaggatcccccgccttttctgactgatcgcaagtatcatcgaagtacaggatacaatttccagcatcatatatcagacccgttggagcacctgttcttgctgctttaagtttctcgactgggaatagtcggtgtggccgctttcgtaacgcacatttgaatttcaaattgtgccctctcttcttcttccgccacacagaccatgagctcgtcagatgggcatactcggtccggttctagctccactgatccctattccaatccagatgtctactatggcaaggaggataatatcaacaagttcaaggcgcgaagacgtgcattctcggtggtaagcagccacccctgaacagtaccccgcggtacaaggtacatcaagcttatctttgactgggatctacagggtctgaatgactacagccgcgaagacatcaataacttctttggaaccttgccctctcgacgcggtagccacggtatgcttgttataaatatgtcggatatgcggtcggtgcgaaagctgacagcaggacagatgaggcatcgggacaacctcggaagttccttatcgaggtggacgagacgcttgcggctcttttgaagcaggaagatacagaccaaaatatgcagatcaccatcgaggatttgggacccaaggtacgctggatggtgtcaaacacaaaaggaccactactaatcgatgtaggtgatctcggtcggaacagcagcgtcatctggacataagcgagtcgacgtgcggggcacatacatgctctccaacctcctccaggagcttacaattgccaaagactacggtcgcaagcacattatccttgatgaagcacggctgagcgaaaatccagtggcgcggctatctcgtctaatcaagaactctttttggaatgccctcacgagacgcatcgatggctccaacatcgaagtggcgggtcgagaccccaaggattggactgcggacccgcgacctcggatctatgtcccgccgggtgctccaatgcagttcgaatactacgagcggattgcgaaagaacgccccgagctacgccttgatgtgcagatgctgccggctgtaatcacgcccgagtatgtgataggactcaacgacaagcccggcctccttgcattggctatgcagaagaagctcaacgaatcgaccggggagactgatctggtcggtgtgccgttcgtagtgccaggcggccggttcaacgagctgtacggttgggatagctacatggaatccctgggactgctcgtcagcgaccgcgtcgacctcgctaagggcatggtagtcaatttctgcttcgagatcaagcactacggcaagatcctgaacgcaaatcgatcttactacctcactcgctcgcaaccgcccttcctgaccgacatggcactgcgcgtctacgagagaatcaaaaacgagcccgattcaaaggagttcctgcgcaatgctgttctcgctgccatcaaggagtacaacagcgtctgggtgacctcccctcgcctcgatccagagtctggtctgtcgagatatcgccctgaaggttggggcgtgcccccagagaccgagcccactcacttcgtgcacattctcactccgtacgcacagaagcacgggatgaccttcgatgaattcgtcaaggcatacaacgctaggactatagtggagcccaaactcgacgagtacttcatgcacgaccgagccgtccgcgaatccggccacgacaccagctaccgctttgagggcgtgtgtgctaacctcgccacagtcgacctcaactccctgctgtacaaatacgaagtcgacatcgcacgaatcatccgcgtgcacttcaacgacaaacttcctatcccagcagagttccgcacacccaaaacccaggacatcgaaaccgagtcctctgcagtgtgggaccggcgtgcgcgcaagcgcaagcagcatatggataagctcctctggaaccctgagaagggcatgtacttcgactacgatacagtcaagaaggagcgcaccgaatacgaaagtgccacaaccttctgggcaatgtgggctggcctcgcgtctcccgcgcaagcagctattatggtcgaaaaggctctgccacgcttcgaggcgttcggcggcctggtctctggcactgaggagtcgcgcggcgcagtgggcctggaacgtcccaaccggcagtgggattacccatatggctgggcgccgcagcagatgcttgcctggaccgccttcatccgctatggctatcaggaggaagcggagcgactggcgtacaagtgggtttacatgatcaccaaggcgtttgttgacttcaacggtgttgtcgtggagaagtatgacgtcactcgtcctattgatccgcatcgggtcgatgccgagtatggcaaccagggcacggacttcaagggagctccgcgtgaagggtatgttcttgtccttactttctttcttttgttgatacttgggtgctaattcgaaaatacagattcggctgggtgaatgccagttatgtctatgggctggagattctcaatgcccatatgagacgcgccttgggaactatcactccctatgagacgtaccataaggcagtcgttgctcagaatgcattctgattgaatttgggttgctcttacagtcaaaattgttgcacaggctaaaagaggatagaaaattcaggtagaagtgagcaagatatttgaacatggtcatcaatccggcagtgtttattgtctagcgctagttttcggttaattcagtcttttcgtttgctaaaagaaggttgataaaataataaaaaagaatgggcgtcgtatattctcgactcacagcatgtgccagtagatgtacgccgtactgcgtactccgtatgcttcatgcaccccgcgatctcgttataacgaacccggtgttgacgagtacgaactggtaccggcgctttaattaatccggcgtaataatgaatttgccccttactaaccggcccttacatttgttaccaaaattacagaccctggcaagcagggccggttagttacaacgtacgtattggtccacttacatgtacgctgagtcattccacgacgaccaatcagaattcatggaataccgcgatgatccatccccacttccaaggttcttaaagctcggtccacctctcacaaggtcgctctccaggactagcggcgacttcctcttcgggagaaaatcagccaatggtgtatagagcttttccaagagttcgttgagatgaggaaatgaccgatattgaaggaaagcgttattagtaccttttcagttcataaatttggaacccaaatataaataatatatgggcccttacaagaaccctccacgtaatgaacatttagtcatgtctcagttggtcctaaataaataaatccggagtgggtttcgctgttcttaaagtaaatggagtccccgccaaatgagcttgagtgcctggagtaccccagaaccccaacccgaaccaaaggcgaaaataagccgatagatacctcggcagaccaaccagggctccgaccgaaaaaagaccgcatttcagagatcccgaaggcgtcatggctctccagatcgaaaattgacgggtgcggagttggggatccctcgttttcccgaggtagttctcgtgtctggggctgaggaattggtatggatgtatggatgtatgcacttggttctggtcatttatattcttgttgtttgtttgttttttttttgtagggggtgggtgtggttgttggttgtctcgttaagcttatctcatatctaatgttcatctataggagagacacgcgactcttcgggtgatgagtgtaggtacgatactagggatgttttctggaaatcttctagagaagatctagagatactttggttcatgttcttgttctagactctactttctgttgtacattccgtacagagtacggagtggttgttcctgatctaccagtcttatcggctctggatgcggatgcggttagtttggcagagctcagttgtgccgaggtccaactcgtaaggcggtttttgagtcattttcccttcgatcaacagggtggaccgcctgcgattggatagttcatttagaggtgtcatgtgttccggtctgatttcgtggagatgctgatatgcggtgatattcggcatatatagcgtaagtgtaatatagtgcaagtgtacaatatagtgcaagtgtacaatatagtgcaagataactgcgagtatgaaggattaccgcgaggatgtagactgtatagcttcgagactatagaacttgatctacgtctacttgtgtgcgcaccacaacaataaacgccgaaaatcgccaaaacacattccatggtaggaacactcaagtcaaagggatcttgaggatttgcctggtggatacctttcgaataccggggcatgacaaaacagcaaggatgactcaggcagacctcgttcccaaggttctgggcagcttttctctccgaatggcgattcttgcaattggccagacgggcgtgatattacggggagttcctagtctatttgaaattgtattattgaatattattccccatgaacattgctccgaatgcagtcgatgcacgtgaaaattagcttacgatatgtcccgtattgtcacggtcatggcatgtgtcttcgacgtcatccggccatctccacataaaatcgagcattcaacatctcacgccaacgtggaatcgagggggaaacgagaggaaaaagcacatggaatgaaactccctcgacgttccagtgagatgccgattattgtgacactaatggcagatttcgaaaacccagtggcaaagggttgtcccattagaccgaggatctgagcctggatcctctcttccgagacccgccttccgcctttcggagcactttgcccgtgaaagattcctgaatgattggaacccattggaagagtgcctaggcattgcgaggtattcgcctgactcccggtgagccgagcgtttaccgactgtgacgcatttgaatgtttaataagtaccccgggttttctggcttgtccgtttcctcttttttattatagcttctcttctcttcctcctccctctatatcccttcctaccttgcttcattctatattcgaagcttcagaacagacgtgacactacctgcacgcctgaatatactatctgactatatctttactatctttaccctttttctgtattataccaaaagtcatgggtctctacgaagatgaggaccgccagttcgcggcagaggttcaggccgttcaaaactggtggaaggactctcggtggcgctacaccaagcgccctttcacagccgagcagattgtggccaagcgtggcaacctcaagatcgagtacccttccaacgtgcaagcgaagaagctctggcgcattgttgaatcaaacttcgagaagaagcaggccagctacacctacggatgccttgagcctactatgatcacccagatgtgcaagttcctcgatactatctacgtctctggatggcaaagctcctccacggcttcgtcgaccgacgagccctcccctgatctggctgattaccctatggtatgttgataatacgatatcaaaagtgtggatgtatacttacaatcattctacaggacaccgtgccccgcaaggttaaccagctgttcctggcacaactcttccacgaccggaaacaacgtgaggagcgtgttactacccccgcagcccagcgtggaaccgtcgccaacgttgactacctgcgccccattatcgccgatgccgacactggtcacggtggtctgaccgccatcatgaagctgaccaagctcttcattgagcgtggtgctgccggtattcacatcgaagatcaggcccccggcacaaagaagtgtggccacatggccggcaaggtcctcgttcccatcagcgagcacatcaaccgtctggttgccatccgcgcccaggccgatatcatgggctccgacctcctcgccatcgcccgtaccgactccgaggccgccaccctcctcacctccaccatcgattaccgcgaccacgccttcatcgtgggctccacaaaccccaccatcaaggatctcaacgacctgatggttgccgccgagcaggctggcaagaacggtgcccagctgcaggccatcgaggacgaatggaccgcccaggccggcctcaagctcttcaacgaagccgtcatcgacaccatcaacgccggctcccacgccaacaagaagagcctcatcgaccagtacctcgctgcctccaagggcaagagcaacaacgaatcccgcgccatcgccaagaacctcaccggcgtcgacatcttctggaactgggattccccccgcacccgcgagggcttctaccgctacaagggcggcacccagtgcgccgtcaaccgcgccatcgcctacgcgcccttcgccgatctcatctggatggagagcaagctgcccgactacaagcaggccaaggaattcgccgacggcgtgcacgccgtgtggcccgagcagaaactcgcctacaacctgtccccctccttcaactggaagaaggccatgccccgcgacgagcaggagacctacatcaagcgtctcggcgagctcggctacgcgtggcagttcatcaccctggccggcctgcacaccaccgcgcttatctcgcaccagttctccaaggccttctcccagcacggcatgcgcgcctacggcgagctcgtgcaggagcccgagatggaggagggcgtcgacgtcgtcacccaccagaagtggagtggtgccaactacgtggataacttgctgaagatggtttccggtggtgtgagcagcactgctgctatgggtaagggtgtgaccgaggatcagttcaagaactgatttgttcggtgcggctcatgttgataccctgatggttttggctgtctatctctatatatgtgcttgatgtcttgtgtatgttgattgtggcgttttcctttttgtttctatggtcttgacttgattccctgtcggtcttgctctcctgttggatgagtgggggccgatttattttgcattttggaaatcacgacataattgatttacatcttgaatgaatgtgacttttttggtggttatttaagttatagtgtaaacctagagggaggatgttcttccgcgttcaaagtataaattagtgctgaacaaggacacctagcaaagttaatcattattagacgggtggatatttaacaaattatcattgaagatggataaaaatagagaagttagcgccccataaaggaccctaaatatatattgtctattaaatatataacacttagcgaacttgatttagttaccctagaagaattgccataatcaagaaatagagcacatttagagtcaagcacaaggtgcatgttcaccggtttaataatagggatgtactagtaaaaagacataacaagaatcatcggatcattgaattaggacataagaaaattgaatgaagaatgcgcccctccttccaatatcagtcgctgaaatattcatcaaggagtcagtaagtggtctccagccgtcagacgtgcaccagcaccgctgggcaggaacaaattagttaatgagctttacgccatatcccgacatgcctcaaggtccgaatctcacactcgaagcgagtagagcgcttgttaggagccttttcccatgcatccgtcgcttgcttgcgcttttgatttggcgacaaagattccaggggaggccgtggtattttttggagctgtgctcgctcaaagtcaatgaacattacccgaccactgtccttattccagaccatgtttccggcgattggatcattgtgaagcacgcccaatgcgtgaatagcatgtagcgagacttcggcttctttaattaaccaatctggttcaacatcgtgtggcttagccagcgtcttgcccgcataccccatcaacgtcaaatgtacaatatccgcgatgccgtcgtaagagaatggttgacggagaggtaagccacccagtacaaccggcacgtgcaccccctgtattggtcgaagacgcgaatacacactttcctcatgttgggcgtatttaacgaactcgactggcacccctttgccaacgaaagtatacccgtgagacagcaatgtcactttatggagggctccgcgtgagccatgaatatgcaaggaatcgcatcctatctccaagtcaggccgcgggtcatgcatggagagttgtcgatggaggagactaatgagtgtcacctgactgattgagtgtcgaccaactccatgatcccgcacattggggcatttctcatctaatcttcctctcgtgaccaagcctaagaggcactgctgtgtacaatactggcgagatttgccctgtgaggaagagcctcctctggatattactgtagttgatgatggtggcaagggtgaagaaccggcgaagcgggaatcccggggccttcgactgggggtatttgagtcgaattcgtcggaagaatcatcaaacccagacgaactcggaacctccaacggaacgcaggattcaaaaagtgcagtaggcattgatcgtgtcttgacgggagacatacgacagtatttgtttctgctctttggggacatgaaatcggaatctgaacagggtacatccttcaccttctctgcttcctcccaaaggtctgcatacaccattacccatgtgtccagattttttgctgccgagtttctccactgaatacttcgcggcggtgtttgcaaagctcggagggtaaaggccaacacctggccgagtgctgtcaagtgtaatctgttatcgtcgcctgtgttgccggtccatccagttgtatcaccaacatcttctttcggcagcgatagataatagtacacggtggaaggatcatcgtgtggaacacgaagaaatatgaatgcttcgccggtacacacatatccatactccagccctgctttgatcatgtaggagaacgcctgtgtgatgactgcagccacaacgcgccgacaagtatcttctggcttctcaacttcctgataacaaagcacgtcgtcgagctctatgtccgagagcccagcctttatatgagcaagcgtgagcttatgtggcgctttgtattcgacaatgaaggcagggaccctttcttcggggcctttgttgtacacacagaactggtccgctcggggtctagagggctttcgcagcataggattttgatcattcgcaactgactgagccgtaagttgaagttgagaagtatgcgactgttttgcggctaatcgctgtgagcggcgcggttgtccctgcgtcaagctcagagatcccatatcggccactatctctgattcgtccgtcaatgtgttcgcatggttttcgaaggtcacatccccattgaggtggaagactcgtcggagttgaggacttgcatacagcttctttatgacctcggcgacacgcaattcgatcgtgaaccgttcaaaatagccgagatcgagctccgagcccatcattccttgaacatcttgcccatatcgctctagcgtatgcctcggcgtaaagtggcgctggacgacaagatcaacgcacatgagattatcccatatagttgtctgctcctgtggaaattccacccactctcggatcctagccgggcgaagcttattgtctgcatttgccgggtcgcctttggtcgatgaatctatacaggtttgtacattcatgccaagaaataagtgaacatggcaagcatcgagaaactcgggaagagtggtatctcgagtctggatcctttcttcacttagttgacgtcgggtctcggcctcgcgttgtcgagcttctgccgcaagttgtcgagcttctgcctcgcgttgtcgagattctgcctcgcgttgttgagcttctgccagaagtcggcgcaactcggatacgtctggctccatttctggcgaattcttccaagatgagatacagagtgagaaactcgatgaagggaaggaagggtgaatttgtgtcgccttttctaggtaggagcgagcaaacaaagtaacaaccccgctttcccttagccaatcatatcccgcatagtcgcatagtaagtcttgggtggtttgtgatgcttatgttgtagaaaaagagaagagatggatacggtgtctttctgggtctttctgggtctttcttgtcttttccagtatctttgttggatattgttttgtcgggtcactcttatagacagaaaaatgcaaacagtgaaccccaaaatagtgaaaaaggagtaagatacccgtgttaaacagacagggatcaagagatatagtcacatgatttatggtgaacggctgcttacgtgtacaaaatagcatcttgaggtccaatggatggatcgcgattcgcgataatcccgatatttcattcaaagcctatcagatggtgccacttctgtagaatctacttgtactccgtactcagctaggaatcccacaatctatccatgtccacctccgaaatcaaatgatcgagtacgcaattagcacgctaattatctgtgacgatcataagagccagctggacaaagttcattatgtacagtaatgtagtaagcgagattctaggcaaggaactgatatactgtagcacgactattggcgattgccctccccgtctagggactacaataatatagcaactaagagtaccaagcttaagggcctatacccccactaccaggtatcaaagttgttatcatagggcacagaaagcgcctgtatactcctggattaggtgggagctggttgggacatcggctgaagaatgtttgagacaaaattgtgccgggcaaaggctaattatctacttggaattggatgtcgatcgactattattgttctcgtttactttttgcagctaatgtatgtacagctgaaaattgcggtcagtagagttggcaataactccatgcattgctatcttttgtggttgttatgctgtaaatatgtttactaaattcccccccaggactggataactcactaactggaacataactaaatatttctctaactacatctagttagtcgaccaagacggcaccaattaataatcaaaataagattggctccactttttaattcgtctagaacataataggattgcaggaagcgtcatgccggtcatactctagcgcacttcgtgtgaagccgcggttattctttatctcggcgtgacactcaataccggttagcccttggatttatgtcctcaaaatagaataaacataaaaaggaggcatcggtaaagaccaaaacaaggaatgagccgagagcttgggacaagtgcggggccttcacctaataggggtacggagtacggagacatggcatgaattatggagacatagacatacgtacggagggatattgatatcagagtggtggaatttgcctaggtaaaattactttaggtatagccgttgtagatcccattatgctattatcggggcccacatccacttatttatataatatccgtagacaaccgctcactttccacctctctttctaaccttaatttatcttaatttatcttcatcatggtcgaactacccgaatttaagactgttccgctggaggagattcctgtgcgcgtcgccacggcccgcaaggcgtttaatgagaacaagacccgtgatgtggagttccgtctcgtccagctgcgcaagctatactgggcgtgagtactgggttcttttgtcttcctggtcatttaactaacagttttacagtgttaaagataatgaggaggccattatggaggcctgcacccaggacctgaacaagcctcggttcgaaaccaacctcgcagagagcgggtggctcctgaacgacattgtcttcacgacgcgcaacctgcacgaatgggccaaggatgagaaggccaacgatattgatctcgccttcaagttcatgaatcccaagatcagaaaggatcccctgggtaccgtgctggtcattgggtatgctacccccatcctccacgatgcgcatgagaataccccccgaaggctaacaagactcttccctattccagtgccttcaacttccccttccagttgaccctcggccccgtcatcggtgctatcgctgccggcaacacagtggtgatcaagcccagcgaaaatgccccccgcagcgcggccgtcatgcagaagatcattgaggagagcctcgacccctcatgttacatggtcctccagggcggcatccccgagacacaggccttgcttgccgaacggtgggacaagattttcttcacaggcggcgccaacgttggacgcatcatcgccaaggccgctgcaccgaatctgactcccgtcgtgctcgagctgggtggtatcaacccagccatcgtggccaagagcgcggacccgcgtctcgtcgcccgccgcttgctctggggtaagctcctcaacgccggccagatctgtacctcgcagaactacctgctggtcgaaagatcgcttgttccggcggtcgtacaggagttcaagaacgcctacaaggagttctaccccaatggttccaagggctcctctgattacgcgcgcatcgtcaacttgcctgccttcaaccgcctcaagaccatgcttgataatactaagggcaagatcgtcatgggtggcactatggatgagaaggagctcttcatcgagccgaccgttgtcctggtcgactcggttgaggactccctgtgctcgcaggagagcttcggtcccttcatccccatcttgcctgtggatagcctcgacgaaggcatcagcgtggccaatagcgtccagagcacaccgctaggtctctaccccttcggtaacaaggctgatgtcgagaagagtaagtttccattttgttttcagtctatctgatctattctaaccctctctcctagttattgcttcaacccgctccggtggcgtctcctgcaacgacgccgcgctccacatcccaactctgccctttggcggtgtcggcgagagtggccacggtgcctaccgcggccgcgccagctttgacgtctgggtgcaccgtcgcaccatcacctccagcccaagctggctggagggcatcctggctatccgctaccccccgtatgccggaaagatcagcacgttcaatgctgccagcgctctgagccccgactttgaccgcagcggcaaaaagctgggtatgggcttgctgcgctgcatcttcactttgggtggaggtagtgcgaaggctggagccttcagggctactgctcttgctgccagtaagtgatcctttctaattttctttctgttcttgccaaattcttgccatttctgtggatattttccacatcttgcacaaatccgtcttgtgggtgggtccggtcaatattggagaatttttttcttcagacgaggagaagcgaattccgagatccctacaccaaccccgtggctccttacatggttccaacgacgaagacgcataatctctgcctatcccatatacccctaacctcatgtgctggcttgatcccgttctctccacgccgaggatgcccatcttcacgcttctcttccaatcatttcaacccgcagatcattatcatcaaagcttttgaaaatcacagtctaaccattaatagttgcctacgtcgtcctccagatcctcgaacgccgatctgcgaaattgtgaacgtgaacatgaacatacgtttgcccctgaacttggataccccgcttacgatctacggtcaatcactccttattttggtatggagaagttgggcttcggcttggattaggatgtgtggatgacttcaggatctttttgctatagtgccacgtaaataaatttgccatgtaggtaagtatgtacttgttggatttagttgctctttttacttttggtgattgatgcttttgttacgaatatttgagagctatgtatatttgtaatccattcaagtctttttttgctttcgaggctttttaccctgtagtgagtgtgtagcttatctagacatcaggaatttggaatggctccaattggagccatacatcccaaaattgggaacaacaagaaccccactagcctacagcattacaaggtacaccgctcattgagaatctagacagatccaacatttatatcatcattcgtgctgtcaaatgcagtgattgtcaaatgcgctatccaatcagacaaatgcctcggttcatctagctagccgaaaaaggaattaagtcaagtacattggctctagcagcgccgttcaacgccgcgattactcacgcacaggtacttgacacccttgtatggcttgacgccctcgcctaagccgcgactgcgacgctggtcgatgttgagactttccaccttgataccagaggggagccagcctcgcacggagaaggataccgacgccgagttaggcattaggcttgcattgacctgggctttggttctgcgtggggtgcgggatgtagatgatggagcgaagaacgcggggaggtgggcgttatcctgggattgtgatcggagagggggtgtgggagttttgtgtatggagggatttggggatggggtggtagctgcaacggggtcttcttccgcgtcttctggttgtaaggcagcggaacgggaggatttctttgtggacttcttcttcttctttttgcgcttggaggggtctgaggatcgagtcttctttgatgtgctggcagatgcatcgttgtaggaggtaggcgcctcgtaatagccttgcaggaggttggcattggcatcttcgtcggcatcctcgacactgtcatcaaggtcatcatcagctgatggatagcccgagaccccgcaacgcagtgtggcagttcctgtcagtgttccggcatccttgccagtgggaacccgccattcgaggagcccacttgagggggagaattgagcgtcaccacggctggcctgcatgtccgtgatatggcggacagactttgagatcggtacgctgacgacaacctcttcaagggccggtccggagcttccacttccgcctccgcctaggaatgacggtgttgatgtcccggatccgcttcgggtagctccaggccgggaagagctttggcccgggaaatttgggttcaaagtcagccgaacctcaaattcagaaccagatgacccgagtgatttacggatatccacaatagcaggtaggaaaagcttttccatatggcttggtgcctcatccagatcaggatctatgggaaggagatccacttcgtacccagccaggataaaccgcccgtcgggaggtatgaagctgagctcacccggccgttccttccatcgagccagtcgaacacatggatgaaataccggtagttcgatcttgcgaccaaggacatgctggccaccaggcgctgataacgatagcagtaggtccgggactcccgatattttcgcagtgaatgcaatggtcccggataccaatgcagacagcagtcgtcctgaaggagccatagtaacagagagggattcaatgatgtcgacatatagctcattagaggtatgtcgtacaccgggccgtcgccaaggaatggcgggtccttgtgatgcactgccggcagcgagagattgcttgagaggattggtagatcctagcgttggcgtagatgtactaaatccaggcgaacacattaatgccagataatatcgtttatcaagtcaagactactcacccaatcccacctagcagcttccccatccacccgggaacctcaacaacctcctgtaacgcattgggttcggtattgcatactattcctccatcgcacatttcattaataagctgcgcaacaacatcataattggcctggatcttagttgagagcagcggtgctccaacaaagtcctcaagtacatcgatcacgcgatgcaggaactccagcgccagaagcggctccgtgtcgacttcgcttattgcaagaaacaacagattcgactcaactgtcgagaataccgtcaccggcggtgaagcgctaggaatgtacagcaaggaagggcgtggttcggcatgggcaaggtagaggggcaggatggcggaggccgagggcgggcgggatcgatatacatgttcgacgaggggggcgctgggaagacgggttagtgtggtcttgcaagccgacgcggaatatcccacttttgctcgtcatatatgtaaacggcatcaatctcgccgctcatggtgactgttgtctgatgatgagatccatgtgtcggcgtagattgcatagctctcgtgttttgccgcggatttccgctttccgataactttttcgagacaacaggcatcaaatcatactaaccgggctctggtggtacggtctgcgtttgtttcttgttcttgtcccgaatatattttaatacgatctaaacacattcatctcctctgaaaagcgcgccatggctacccagctgaaagacgccaagcaggctctggccgaggacaagtacgacgactgtctggcctgcagagtgactggtatgtttatttttagcccgtgattcgggctggtattacaagcatttggtactgatattcggcaacaggatctgctgcttttatgggcctgggggtctacagctactacactggaatggccaatctccggaaacaagagaaggccatcatgcaaggcccctcaaaatacaaaatgggctcgcgaaagttagggatcttttcgatttcagcgacattagtgggaatggggctgtggcgggcgtttaattgagcattttatattgaacatataccgaagcatatggatgtgacgaaggccggggtcgagcaggctgtttgatagcgaagtgcaggctggaggttttgtaagatattgattgttatttagttgcaagccaatgataattgccactccgggtatcgggaatatccgcatctatatgctatatgacaaggggaagaagagggaattggataagaaaaagagacaaaaaaagatcaaagaaacccaagtaagacagcagccaaaaagaaaaaaagccatatgcaaaaagtcccttgttatgcacccgaaaagcaccttcatacccggaatttcaaccagccactgtgtgacaatcagaagggaatggtcgtcacttcgtcatcatataatgctttacccaggggaagccctaggtaaagcggcctcgtttcccaccccctcctgacatatctcgtccgttgttaagtcctgatagatcaaagaaatctgggaaagtgaatttcctcttggacccaatactagcaggggactcccgtggcgaaatgcgcgcgttggatcgtgggtggttgttgtgacgatggtgtggccgactgttgcggggcatcaccgacacgctcacaggagcgtcttgcatggtcgcagatgagttgtctgacgactgcacatccatgtcgagctcctgacactgagggtatgtaggaccggcagagaatgtgaagacggcaggcgtggcgaaagaagatgtttcgtggagttgtgtgggaggagtgattgcctctggcttagatgcgggtacgggcactgaagtggggggctgacgagaaattgtttcgggtgtaggtttttctttgcggacagtagccggagtagcacttcggtcacgcttgtctgcctctgtatcttcatcgctgctctgtgatccagttccgtcgcatttttcagttgcccattgtcggaccttccacccctctccgtctccgagaccgaggttctcacggtcaaggaagtggagcagatcctctatcgcttcctggtatcctgatgaccttgcatgggcttgttcacatactgcattcttgtacaggtttgtgacagacagagccgccgccttgaattgctggaggagtagctccgggggttgcgggcggggtgtcgagctcggaagagaggtgttgagggacctcatggagtccatggcagggagcaatgtcaaggccctgctgggcaacgggtttgaggacaaaagtgtttgtgtggacaacttctaatgccgtgcgtcgttcgtcggtagacaaatggcgatagcgaggagcttgcggtgatgaaagagagcagttggaacgaaagagactcaaataatataacaaacaaaggccagaacagccagaatcagacaaatcaggtagttggtcgcctacctgtgcaacaataagcaccaagatgtgtcaacggaggaactttcaaggttgttgcagatgacctggcccggtaacgagaagcccactttccgacggaataacaatattccataccgtaggccctaccgaaaggcggtatcttcatttgccgtcgacgcgctttgaataccttcccgtggttcctagaattattcaatagcattcattctttaggacccccctttatggattgcttcaacctttgaattcgtcttggactatatctagacagtctccctcacctcctcaccacttcgaccgcagctggttctttcttcctgcactacgcgacccgactagtcgcgcgcttccaatattctttgttgcacgcttacatacgtgcttaaatagccagcgcacctattctgttcaccacagataaaacatggctcctgccctcgcgtctgatcctgtctcgcaggcagatactcctatgactgatacaaatgacgacacggtccccttggtgcccgtggatagtgccgacgcgcaaatgacggtatgtgaggttgtgtctactcgcttgtttagagtgaagttctgcatgatttcttatgtgtttttttgattttttttgctctaagctcatgctaattttcactttcgcaatctagagccgccaagacaccccagattatacggtaaagacacctttggtctacaacgctgtttattagagggcgttgctaattatttgataggactctgacacaaatgcaaacaccactgcaagcagcgttgcgggcgacgccgcggccgatggacgtaggcgcagatctgaggccaatcacctcagaaaaagcatcctaggcaagaagcatggccgcctcgataatacaaaggtatgggctataacataaaatttccaatggcccatttgctgatacatggtatctcacaggaggatgattcgattcgccgattccgataccttctcggtctcaccgacctgttccgccatttcatcgagacgaatccaaaccctgagattaagcagattatggcggaaatcgaccgacaaaatgcagaggcagaggaaaaggcccgcaagggtactaagcgcactgggggtgctggtagtgagcggcgccgcaggaccgaacaagaggaagacgcagagctgctacaagatgagaagcagggcggcaataccactactgtcttccgagagtcaccatcatttatccgtggtgagctacgtgattaccaggttgcgggcttgaactggctagtttcgctacatgagaacggtatttcgggtatcctggccgatgagatgggtctcggtaagaccctgcaaacgatttcattcctgggctatctacgttacattcgtgatatcaacggacctcatttggtcgtcgtgccgaagtcaaccctggacaactggaagcgagagttcgcaaggtggaccccggacatcgatgtcctggtgctgcagggtaacaaagaagaacgacagcagttgatcaatgagcgcttagtcgaggaaaagttcgatgtttgcatcaccagttacgagatgatcctccgtgagaagtcgcacctgaagaagttcgcctgggaatacattatcatcgacgaggcccatcgaatcaaaaacgaagaatcctcgttgtcacaaatcatccgccttttcaactcccgcaatcggctactgattactggtactccgctacaaaacaatctgcatgaactgtgggctttgctcaacttccttcttcccgatgtcttcggcgattcggaggcatttgaccagtggttctccaaccaagattccgaccaagacaccgtggtacagcaactccaccgtgttctccggcctttcttgcttcgacgtgtgaagagtgatgtcgagaagagtttgctgccgaaaaaggaactaaatctctatgttcctatgtccgaaatgcaacggaggtggtaccagaaaattctggagaaagatattgatgccgtcaacggcgccgctgggaagcgcgagtctaagacccgcctgttgaacattgtcatgcaactccggaagtgttgcaaccatccttacctgttcgagggagctgaaccaggtcctccatatacgactgacgaacatcttattttcaactccggaaagatggtcattctggacaaacttttgaagcgcatgcaagcggacggtagtcgtgtccttatcttctctcagatgagtcgtgtactagatatcttggaagattattgttgtttccgagactacaactactgccggatcgatggtaccacggcacatgaggaccgcatcgctgccattgatgactacaacaagcccggttccgacaaattcgttttccttctcaccaccagagcgggtggtctgggtatcaacttgacctcagccgatatcgtggttctcttcgacagtgactggaacccgcaagctgatttgcaggccatggaccgagcccaccgcattggtcaaaccaagcaggttaaagttttccggtttatcacagagaacgccattgaagagaaggttctggagcgagcagctcagaaactgcgcttggatcagcttgtcattcaacaaggtcgttccggacaacaggccggaaaagcatcttcgaaagacgacctccttggtatgattcagcacggtgctgccaacgtcttcaacaccaagggtggagatgcaaccgagctcgccgaagatgaggatatcgagactatcctgcgtaaaggcgaagaacgaactgcagagctcagcaagaagtacgagaccctcggcattgatgacttgcagaagttctcctctgagagtgcgtatgaatggaacggcaaagatttcaccgagcggaagaaggacatcggcatcagctggatcaacccagccaagcgtgagcgcaaagagcaattttattccatcgataaatactaccgccaagccttggccactggaggccgaaccgccgacacaaagcccaaggtaccacgtgctcctaaacaaatcactgtccacgactggcaattcttccctcctggtctccacgagctccaagaaaaggagacggcctatttccacaaggagatcggttacaaggctcaattgcctgaggggcccgaagaggagcttagtgacagagaggctgagcgggaccttgaacaacaggaaattgacaactctgtcccgcttactgaagaagagcaagccgagaaagctcgtatgtcagaagaaggctttgcaacctggaaccgacgtgatttccagcaatttatcaatggatctgctaagtttggtcgcactgactacaagggtatcgctactgaggtggatagcaaggatcccaatgagatcaaagaatatgccgaagtcttctggcgccgatacaccgagatccaagactatccgaagtatctccgagtcatcgatcaaggtgaggagaaggtgcggaagatagatcatcagcggaagatgctccgcaagaagttggagatgtaccgcgtgccgctacagcagctcaagatcaactacaccgtgtccactaccaacaaaaaggtctacaccgaggacgaggaccgattcttgttaatcatgctggacaagtatggggttgagggtgaggatttgtacgaaaacattcgtgaagagattcgtgattcgcccttgttccgattcgatttcttcatgctgagtcggacacccgtggaaattggtcgccgctgcactactcttctgaacactgtggcgaaggagttcgaccccagtgagggcaagggccgtggtcgtgatcgtgatgaggaggaagagatagaagaagcaccccctgccaagaagaaggctaagaatggagctgctgtaagttttgtctgatcgattatctaatgttttgggttctaacttctttcacagccgaccaaacaggtcaaggccgtcaagggtggtagcaagactgcttctgccgccagctcccgggctcccagtgctcccgcaactaagtctaaaactcgcaggagataatcgtgtggatcgagtgtccacgggtgtgtacgttgctagtttgctacggttgttattggtgattcgggtattagggacggttttgttagggatcggcgcagatgatgttttaatgtacttttgtaattgaaatagagttacttgttctacttgcaaaggcttatcgtatattttcctgtacaatccctgcatattccgaaaacccccgcctgaccggagtccgcaacgccgtgcagatcggatgccaccctggcgccatatcacgctgctgaaacaacactaaccctgagtcgcctgcaatgacggaaattcaggtttctagacttggtctcaatctaaaaaatgcctagcctcctagctagacgtcgcaatacttaaaagccatgacgacgcttgtttcaagccccagttcattgcatgataacatcccatagtataaatacttaaggagaccccgcgctctagccatccatgctcaaatttctcaaatcaaaactatccaagtcccccaccatgcctagaatcaacctcatcgcgaacccgcactaccagaagtccggcacgaagtcgtacttgtacgctatgcgcaagtatcacttcacgccgactaaggaaggcccgtattttctcggtaccaggatggtgcaaagtggccgacagtacaccaataagcccgtgggaggccgtgctcggttgcagcaggtgctgcagaagaaggatgctactagcgatcaggttgggcaagtgagtgccaacgacgtgcagaatgactcgatgtatcttgcacaagttgctattggcacacctgcccagacgctcagtttggacttcgataccggatctgcggatctgtgggtaagtggatttctttcgctcttctccgtgcgatatgaacgttgctaagattgtctaggtctggtccacggagttgccgtctaagactttgtcggcgtacaaaaaccatacaatcttcgatccgaccaagtccagcacgtataaagagaaagaaggctcatcgtggcagatcaagtacggtgatggctcttctgcctctggctcggtcggcaacgataatgtcaacatcggtgggctggtggtcaaaggccaggccgttgagatcgctgatttattgtccgagcaatttgagcaaggtgctggggatgggttgctgggacttgcgttcggtaatatcaataccgtcaagcccgagcccgtcagcacgcctgtggagaatatgatttcgcagaccgatatcccgaagtcagccgagctcttcaccgcgaaattagggtcgtggagagactctgatgagccggataagggcgagtcattctatacttttggttatattgatcaggacacggtgaaggccgccgaggcagagatctactacactcccgtcgataacagccagggattctggatgttcgattctgcctcggcgacagtgaatgggaagtcgattgcccgggctggaaacaaggctattgcggatacagggactaccttggcgttggtggatgatgagacttgtcaggccatttatgatgctatcccgggggcagagtatgacaatgagagccagggatggatcttcccatccaacacaccggctaataagttgcctgttatatcttttgctgttggtgatacgcagtttgttgtgcaaaaggaagatcttggatttgctgaggctaagtctggttatgtctatggaggcatccagagtcgtggtactatgaccatggacatcctgggagataccttcctgaaggctatctatgcagtgagtgatatattcttggagttcacaatcgcacaagctaacgataattacaggtcttcgatgccggcaatcttcgcttcggtgctgtgcagcgaaaggagctgcatcagaatctctctgtgcctccggagtcaagctaggcatatgatatgtatcatgtaaacggactgtgaattactggagtctgtagacatatttattgtgagtcaaggaagataaattactacagaatgcacttgccgctatatgagaaactgctacgattcacgaatagaaaacatgagtgggttcctcgagctggtgtgattaaccctaattcaaaacagactcgaacaaagactcaaatcaaatactccaattatgtgctattgtacaaagatgtagtgtaaatgctagaatacatagttattacagtaaaatcaccacgttttctccttcttttccttcttggcgatctcaccgacagtcatgggggttcgcaagaacttctccatcaatagcgcggcggcgacactcacattcagactgtcgatgcgggcaggatccgattcaacgccgagaatagaactttgccgggcgccgggaatactgatgatcgcatctgcatgtgacttgatatgcgagctcaatccagtagcctcactgcccatcattatgacactaggcccagtagtggagggcagtttggccccgctttgatcaccatcggccgagatatgatccatgtgcacagagccaggaagtggtgcatctgcagcatagaatcgccacccgttttgctgggatcgctgaataaaatcaacttcatttgtcacatgaagaataggcatgttttctgctgcacccgcagaacatttgattgtgataggagacattggtgcggagttgcgaccagccagaacgattgcatcgacaccgaggaaatatgatgagcggatgatagcgcccatattaccggtatcaaccactccatccaatagcaagacaattgggtatctatggcgttgttcggcctcatgcggggacggagaaggatgatggatctggatacgatcatccgtgccatttactgcagcttcctcccgggtttgtggtgcaagctccgtccggaaatattcctcggagatagatggaacagccaggaggccacgcactggtaattttggtagaggagatgcctccaaaatgcacccattgtgagggcgtccagcactcatcttgtccatgagtcgatcccaccctgcaaatgccatttttactgcaatgttctttgacaatgctagtttgcggattgtgacctttgctgcacttagctcttcctccgtgctctgatagatatagagcttgtatagttgacgccgactgcagcgcagcgccgcctctaccgcactggtgccgtaaatgaactcagatgctggtgtggtgtaggggattgtatcgggcactttgacgttctctttcacccgctctggcatgctgcgcgtgactcggtgagccctaggtcttactggctctttctcccgtggttcatccatccaaggtctttctcgtcccgattgtgcgaatggactgtcttgtgttcgcgattggaatcgtgattggaatcgagattgatgttcacggggtagtcctcggaaatcaccagaacgaatgaactcatcctcgtcgaactcaaacttttcttcttttcggctttctcgtggtgattgagacttctcattccatggcgattgtcggcggtcatagtctttacgacctacaccgtccgatgtccagggcttttttgctccgtattctcgctcaccctggccatagcttcgacgaacaccggagttaaatcccgatctctcgggcttctgttctccatactgtcgtgctccatctgttcgacggtcattgaagttggtttggtctgatctctcgtatttttgctgcccatactgtcgggatccgttggtttgacggtcagcgaaattagattcgcctgatctctcatactgtcgcgccccgtatttcccctcgtattctcgttcgcgtttaggaaaacgagtgtcgttgccgcgccgattatctctgtccgcggtctgagatctgcgaataccttcgccaattgctgaattcaatgatgcatgccgaatcgccaagaccgtagaatgcgaggagcggatcactctagaaagaccatccaggcccgttcttgagatagtactgagcatcgcgacgaagttctggtctttgcagtttcgtccgtgcggctttggagaacttcgacatcgaattgcacgatcggtatgtaccctctgccgtacttatcgttatcggatctagacgcgcaacgcgaacttctcgtgtatgccacttaatcttcccacttagtcttctcgacttcgactttgtttttctctctcactcctcttcttcatccattcattcgttccgttctttatcaatttgaattcatctttcctttgagcatccagtccacgcaaagtttgctttttttttcccattgggatctgcaatcctatcatcaatcaaatagttatccattcactgcttagcttcagttcagttgacttttcttttctctttgtaggagccgcatgtgcggttcctacgccatcccaatttgctgattcttggtccaatcggaaaatcaccatgtctcaatctagagacaattctccaggctctgatagctctgatgatgctgatgctgtggctgcacaattgctagcacagttccagagcgctccctcttgtactcctcccaccatcccacctgagggtcctgaaaatgccctccagccagtgcaacatatcactagaaactcaaaagaatcaacaatgtcttttgagatcatcgtcccagtggttaacaaccctgatgactatgagtatttgcccggtcactttgaggttcatcgcattcttgcagtcgacatgcatgagccaaagctcattgtgagactcaaaagtggtgaagttcaaactgtaagcgaacacaagtaatcaatcaatcttaggcgccgttcaactgaccatgactttcactagatgaccaccaaagatttgaaaagcctcaagaacggacgaaaggctttgcgtgaattcaaccgtgactcacagagccctgaccccctcgcaatggaccactcccccatcccacatttcatttacgcgggtggagatggtcctgcggactatgattcagatatggactggggaattgcacgaaaccgccaacgacgcgcgccgttggtctcatacaacaatttcttccgcagtgatgatgaagaagatgaagacgactatcaaagccgccgtgaagagattgactcagaggagtccagtgatgaggatgaagatgaagatgatcctccaaccaaacgccgccaacgccgccctccgagaaggggtgcgcagaggggccgaaagcaacgtgatcgcgaatggtctgaacagtcttctgcctctgatacaggcaaacgagtatcatctcgcctgcgacagacccgtcgacgcaatatgaaagaacgcttcgaagacgacgaatattctgcggttgaacctgagcagcctaagcaccaaaagttctcgggtgcgagggagcagttccgtgaactaccacaggacaataaattcagattgtgccactcccagtcatgcacccaatgcggccatggagatcatgaccgtgaaaaggggtctttggtcttctgccaaggttgtaccgtgtcataccatcaaggttgtcttggcgatcgaaccagccgaaagcacttggtcaccaaggttgacgaaggggatttcattcttcaatgcagtcggtgtttggggatcaagcaccaagagcatgacatgaagcctcatttaggccattgtgccgtgtgtagagacgaaggacccatgtcgcagccgttgcgagagactctttcttcccagactgagcagcacttgcgggaagccaatggtggcatagatccgattactcccgtggatatgtccagtgtcaacaatgtcgataatatcctcatcagatgccttggtggcagccatagctgcaagcgagccttccatattcagcatctaccaaacacggcagaggagaaccttacccacattgatcctgataactggcaatgcgacgaatgctctaaatcacctcctggtgccaatccaatccaggtgatcgttgcttggaaaccaaggaatcccgaagtcaaagtcgtctcgcagttggttgagatgatcccagagatcgacaaactatatctcgtcaagtggcacaagctgtcctacttccgtgttacctgggtgactggagactgggtctgggccaggattcctgccagccagatgaaggcgtttctcaagtcagaaagatccaccaaaccgattatgacagtagctgaggctgtccccgaagacaatctgcgagtggacattgtttttgatgtggaatatcacaccgagcctaaatcccaggaggatcgagcaaacgccaagatggtcgaacgggcatacgtcaagtacaaagggttgtcatacgaagactcagtctgggaaattcccccagaacagactgacacagctcgttgggaggatttccagaccgctcttatcgacaaagtacgccaagagaatgtccacgtcccgaagccgaaagatcttcaaagccgtctcagagatgtccgtagagagaagtttgaccagagccttcttctgactgctcagcctgcgttggtgaccggtggtgagctcatggattatcagatggaaggcgtgaattggctgctgtacatgttcttcaagcaaaccaacgccattcttgctgacgatatgggcctcggaaagacaatccaggtcatcaccctattcgcggcattgatcgataagctagactgttttccattcttggtcgttgttccaaatgcgactgtgccaaactggcgccgagagatcaagagctggtcgccacacatccgggttgtcacctattatgggagtgccttcgctcgcgagatggccagggaccatgagatgtttgacgagaatggcactctatgttgccatgtggttattgcttcgtatgagagcatggcagacgatggggctaagcgagtcttgtccagtatcaattgggctggcttggtggttgatgaaggtcagcgcctcaagaatgacaagacccagctctatgagcgtcttcgtcgcatgaaattcggtttcaagttgctgctcactggtacaccgcttcaaaataatatcagagagctcttcaacttggttcagttcatcgacccaacttacaatgcggaggagttggaggccaaatacgcaggagccctcgacagggaagcgattcgcgagctccacgacatgattcggccatgtctcctgcgtcgaacaaaggcagaggttctgccgttcctacccccgatggtgcaaatcatcattccagtttcgatgtctgttgtgcagaagaagctgtacaaatcgatccttcaaaagaacccgcagcttctcaaggctatttgcaagaagcaagtcgggcagttgaagaaagcagagcgccataatttgaacaatatcctaatgcagctgcgcaaatgtctttgtcacccgttcatttataaccgggacatcgaagagcagactctggactctcagctttcccatcggcgtttggtcgaagcatccgggaagcttacgttgctgaacttgatgttaccgcgacttcgagagcgtggacaccgcgtcctcatcttcagtcaatttttagagaacctcgacattgttgaagacttcctcactggactgggactccagtactgtcgcctggatggaaacttatcctcgagggaaaaacagcaacagatcgaccagtttaacgcgccgaaatcccaattctttgcctttttgctttcgacgcggtccggtggtgtcggaattaacctcgccactgccgatacggtcatcatcatggatccggatttcaatccaaaacaagacatgcaggctctgtcgcgtgctcatcgaatcgggcaaaagaatacagtccttgttttccacctggtagtgcgcgcgtcagtggaggaaaaaatcatgcagaaaggtaaaaccaagatggcactcgatcacgtacttatcgatcgcatcgaggccgatgaagataaagaagacttagagtccatcctcaagcatggtgcggaggcactgttcaatgacgatgactcggcagacattacttacgatgtggactccattgacaagctgttggaccgtagccaggctgagcaggtcaagaaaattgccagcgagggaagttcggaccagaatgagcagacgcagttcaatttcgcccgggtgtggcaaaaggatcgaggtagccttgaagaagtgactgagactgaggacacgcctgtggatgttacggcgtgggagaagattctgcaggagcgtgagcgtgaagcgcaggaggaagctaaccgtcaagctgaaggtcttgggcgcggtaaaagaaagcgcggcacaccccgctacaataacaatattgttatcgaaggagttgacgacgatgagaatcttagcccccgaaagccgcctagcaagatgcgaaagcgtgcagctgacaatgacgatgagttccaacagccagaggatgatggtgatgagaccgagttcgagtccgatcacggcgctgagccaatggaccttacatacgatggagctgagccaatggacaccgcaaatgacggcgacaggactgaggcacaaatgggcactacaaatgttgtcacacctggtcttcatgtaggtgcaggacagcaaggtgagatctaatccatattccatgcgtatcctagttattgcttttttttgttttttttttttgattttaataccctatcattccgtattgccgtgtaaagacacagttcgttaactgtacatgattctcagtcgcacgcgcgttccgttgtgttaattccccgcccccagtgacctaccaccttgatatccgtccttgtgtggcgtgcaaacaacgccacatccctgggcagtgcccactccgttcggctggtgtcgagttctgtggcctctgcggcctggcgcactggggtggccgccggatctgcccccacctgcagtcacgggtgcaggtcagccttatgctggatacgctggaagagagcccggaggacccggccctcatccttaaggcgaaaaaataccttcggggtgttctcaaatcaatggggcagactgcccggagcaaggcttcgtctgccactcaggcggagtctcggattttcacctcgccctcagttagcggggtgagccgtgcccctaccgatttaacaggggcaagtactgagtcgaaagactaaataatgtctactgccacggccggccccagtaggggcgtcttttgatcactttgtgattaccgtcagagatgagccgcggctcccctctttctttctctgatttttggtttgttttgttttgtttgtgtacttgcattgggagagtttggtatgtctcccaaaaaaagggggggttgttctgagcgttatgagcgaaagatacccagctttgttttgatccagctttgttttgatacattgagtaaattgagagaatcaatatgaagttgtatgattatagtattgcatgttgtactccgtagaacaagtaggtccactctgatatgcgatggtatcgcaggaaagtagagagatcgatgtttttagttatttgcatccatttcttttgtttctatggacctttgagcaaatactttactagataggatagtttccgatatcaatgacgactagaaagcagtccaaatcaggcaaacatttaaatctcaccatataagccgtagggatttttagtggtgacacgcaaaatctttaaataaacaaagaggtgcatacggacatccttcttcatcactccacatgtccctcttccctgcctccaccgctactgaattcaaacaagaaccatcttactaggatactgatatgccattagccttcaagatccagccaaatgggccgacggcaaatttccaccactctgactctaagcgcagtctagtcccctacacatgttccgagatcccttgacacaaagccaaaaggccagctctccatcgtatgtttcaggcaatggggagagtaactaaggcctgtcaaaggccactgaattgtcatattatccatgggaactattccagttgtggccagtgtctggcagcattccgcatgttttctagtaaaattacactggtctcgacaactacaacccagctagcttggtgctagctccatctaatctaacaagagacctgctgcaactgaagcatgagctgaacaatgacttggatgtgggtgaggtcgtcgaagaaaagaaacggatcaacagcagaagaacacagacagaatcaggttgaggaatcgagaacactggcggaagaacgcagagcgactcagctcgagatctcgagaatggcgacagaaaaacgccgacagaatcaagtcaagaaagcgagaatgctaccagaagaacgcttcggtacacaatcaaaataacgcgggggaaatccagccaagatgataatggagacatgaaatgaaaggaagtatctcaatgcaggaattagacaaccagttcaagcaagaggaccggctgtcaagtccctgggatgggttgtagaagtggagcataccatggccaaggtcatccatcaggatagccttggcagaattgcagttgataaattttttcgtttcatttgttttgtttctatacaagggtttatttggcttggaatcttacgctagatttggtggatttgcaacgttcggagattttattctgcagccaatgattgttggcttcggaaaatttaggttaagctaagccacccgtacccgagccgcattgtctattgtgacaacatgcaacatgacgggaaagaagaacagcaccagatgatatttcttattggattctttgggctcatgatcaatttcgactttgtgcctctagatgtgtttataggctacttgcaggttagatgggttgtggtagttgtggtgaccgcccgaaagcactttgtcctattttcaagcaagcaatacaagttttccttaatgtgaaaaagaatgcctagtagcttttctagagtactgaaagtaagatgtatagttccaaggtaataaatatagttggcataaggtggaaagggacgctacgataagtcgtaccgggtcgaagaggtgtatatttacgagacaacataactcacacagacctagacgaaccaagagactaaatcattgtgtcattctcatatagtaagacttcaatctttgtttgtactagtatattcttcgtgtcccaccctctacccatagaaacaatacaaaggacatgagtattggtggagccttaagcatatgtagcattgatataagcacattgaaggcaaggaacatgcagaagcagcatggaaggtcagatttagaattggactaagtatgttctgcaggtagccggccaaccttgccaagacacacgtccacgatgcctttacgcgccaaatgtaacagtcgccgaatgatacacagcttattcgtgcctttaattggtctattcctacactattctagatctatctgctctttgatatgcatagaatgatgtttgcatgccacctgcaacattgtaccctcatttcccggtctgatggaccagggcgtctttgtcatggcgaccttattgtgagcttaaacacagatagatcccattgtgtattcagtatatccgatgtatctagaatagtatagttcattgagtagatctaattcatatatctctttgatatgtagatagttagcgcaaggcaggcttcatgagctggggctctccaatatatgagattgtgttttcccgaatctcagtttcccatcccatcttcccattttgctattgtcctgtttgtcaactctagggctatcaccctgtcacctgtcacctgtcacctccccccccttctcgcacaaacacttcttcccacctattttcttcatccctcttacctcttcctttctgtaccatacagaccattcttactgcacaatcctatccaccccagtctctcatctttattcttgagcaagatttgccttttgtcaagatggcggctcctggtcgtcctcaatttttctgcacccgtcctgatgggtccttgactcctctggtagcagttgatgagctacccactaacgtcaccatccatggtgcccctcgtatcatcactgctggggagacccagggtatgaccagctgtggcctggctgcccaacgtcccgaaccttggtctgtcgagggacttcccaagtcctctgagggtctgcctgatatgcacagcctcttgctgcagcttatcaccgataagaatgtccctgaggacatgcaggcatctgccaaagccattctcttcaagggaatcgacaacggacgtgtcggtcaaggcactccttccaacggactttctccaatggcgccgacattccagacaaagaacaaccacgtcggcaacaagcatgtatggccaagtgttcctgtcatgtcatggtccattatttaaccctttcaacataggctccgacttccaagaaggaatactgctcgtactggattcgccacggtgaatgcgattactcccagcaaggcaagttgaccacatgacggagactctatgaggccttgactgacccgatgtcacaggttgcttgtacaaacatgaaatgcccaatgagcaggagttgattgagaaacttgggctgcgtgatattccccgctggtaccgcgagaagttcaacgtaaccagccttttgcacccaaatcgtaatcgcccccagctgaccattgcggatcagcaaccccccatgcgggccctgccgtcctcggcttcgcctactgacgagatcaacgccgacaaggcgtccaatgtctgtgaaaccccgaaattgagcaagtctgccgagttcaccaagtcccctccccgtggaccatccaaccgtggaggtcacaacgggtttggtaaccgcggtggccgaaacggggctcccaatggacatcatgtcagcaactggaaaggctcccaccgtggtggccgtaaccgaaacatgggctcaactcgtcacggtatgatgagcgagcgtgacagcgatcgcagcggcgagtgttccccccgcgcctcagctatcgcccgttatgacactcaggcatttggccgcgatcaagttcgcacccctatccccgcgctgcgcagcatgatcactatcgataccgaccaacgtcccaacgaatgtcttttggatgacggtaactttcaaacccggaacctctaccggaatatcaatagcctgaccgagtgtaatgaagataccttcgaagacgccctgaacaagccgattgagcccaaccaccgtgtccagtcctcccacgtgtaccagcacgactcgaacacttcttccgatggtggtgtcatgttccccaagaaccatgccgcgtgggattcgaactttggttcattcgctcacgttgatatccctgctcgcaagcagtcggagtcgaacagctctcgtgccaccgtccagagggattacggatcttccactccccgcattggagatcttcagctcaacgacaatgtgcccctgagctcgaatgacacccgtgtcacctggggtcccattggaggtcccattctcaagcgtaccagccctcctctcgagaacatctcgcacatgtttggaccttactccaacagtctccgccgcagcaactaattggattgtctgaaacaattcagtcaggcatgcttggcctggagtggtactcatgatttcatgatgccgctccctgattgtttcttcaggcgtatgagatctggtgcttggatgttgttttctttcgatgtcgatctaccggataattatgccatatcataccacaggctatacccaagcaaatggaatagtcatgacgacaatcctcatggtggagaggcagttgtggtcaattttttcgtttctttattttctttatttgatttttattgtttctttgcgtggcaccgttcaagcgtttcaagcgttcaaaatatggaaaaaaaatgtgcccatatggagttgtgatttttgcgtgttttgcttctattcttatttacctggaaccgcagcggggccttgttccatcatggacgggatgttgttgttttacagaggaactgggctatgaccagttatcaatgcaatgttttattgccatttcggttctctagtagtctctacgcagttgcgagtaaagtagagatctaagttgtactcgctggtaagtcaagcggcaaactacaaatggaacaacagcgagccgccaatgcatggaataaaatgactatagtacattcgaaagaaaaatgccaaaaatcctgaaatatgcgcccgcgcctcgcaaatgtttgacaacagcttctcaaacacacccaatatacagttgacgacatccattaccggcgagccacctttttccgagcgccaaccttgacagcaacgcgctcccgctcgtcagcggccttgacctggagagcagggttgagtgaaggcagagtcttgatagcctcggagacaaccgaattaccgtccacaagggcagctcgctcttcctcggcaactagacgctccttgcgccgcgcagccagctgactccgacgggtctcggtcatgttccaggattcggggaattgcagcttggtcttgggcctgtggtggcggaggtcgagcgggacatcggcgaaggagtcgccttccttggcctccttgatcatcgagttaacgagatctgccaggtagcgcttgttctgggcgcgcgagccaaacttctcgctcgacatgcggatgatatcggtctgcgggttgtagcgcggaccggccagcttgaggaatgtttggcgctgggcttcggtgagatacttgggagtcaaatcttgggagacaagctccacaacgaccttcggctctgctgggtgctgttcacccatgtaggtagtgtagcggaagcgcagaatgtgggtggagggaggcagggtgaatggtttggcgagctctagttcaacgttagtggaaagactagtccgatgagcaattgatcttactgctcagcattggcatgtcccatgcggtaatgcgggcatattctctcatttcacggtgcaattccatctctgcatgtgctagggacgtgatttcgtcgtcattgatttcctcatctccatcctcgagtgtgttcaccaactcgtcaggctcgtcttcagcccagaaaccagcccgacggggccgaggctcttcgaatcggagatcttcttccttatcaatccttagcatgctctgctcgatttcctcaaaggccgcggcgcgcttcctggggtcgttgaattcggcaaccatgcggatgttctgttcgtcgaatgccgcgcgctcctcgggagacatcatatcgtacattgagcgctgctccttgggaaggagatcgactgagtactcaggcattggggggaaatcctccggtctgagttccttcggcggaggaggaatcacggggtcatcctggacgcgattgagcggcgaggcggagaagtaccgagcagatggggcgatgaggcccctccgagccagatgcccgaccgggcgagtcagtaaccgagctgctgaagccattgttgagggtatagcgtgggtagggacaggatctcaatcacgatgttttccgcttccacttttgcgaggttcaccgccgtacgctattccagattaggactagtgtagttcgttctcacgtgatagcatggtatatgctgatctttggattggacaattcccttatatggagatgatgattgactacgagagaacttttcaagactgattctctgcttacttcgatctaataacatcgccactatgaagttatgttttgtgactgtgggggccacggcttcctttcagaaactacttgaacaagtacttaattcacaatttctcgagatcctagccaaacacggctacacccatcttcttgttcagtacggtaaagatggccagcagattttccaaaacttcgtcgatagtgaccaacccgaccacggtatcaccctagggggcttcgacttccagccgagcatcgatgcccaaatgatgatgaccgtggaaagagaggctctggaccaaaagcgcggcttgatcatttgtcacgctggtatgaaaatcaatattcgcctgtccaatatggatgccctgatccacttaccatctcacaggaactgggactattctggcaggacttcgcttgggcgtgcctttgattgtggtccctaatccagaccttgccgataatcatcaacaggaactagccgatgagctggaggaagggaactacgtaattagtagttctgtcgagtaaataacctatcctcctttgtcttggccagtctggctaacctctgacagggatgtgggcagtgcgattagcagagcagagactcagaaagccgaagtattgtctatgacacctggaaatacaactcttgcggaaagtatgtctgatgatttgtgctttttggactaaaggaatctctggtggcctctttccgccaacactttttgttgcctggatgggcttgagcgctggcttttatcacgaattacgacgctgcatgaaaacaaaatgggaattaatcaagcaattggtccgagttggtctggtctatggagttgagaggagacctcatgatatacacgaagagaatcaattacttctcgacccattaaccactaccgattagcttttagtacaaatatcggcccatgtgtattatcgcactatatatcgcactataatcagtaaaatatttaatatctgtaactcgaattatcgttgaagtccaattcaccaggcgcggactagtggcccaagctccttgttgacaattcccgatttgcggatttgcggtttcgcgtccactcctgaatcgacaacatcaacgcccagccaccgaaacactatatgcgccttcaatcaacatccactccgttgatcctccgagtctcccattctaggccgagaggccgtctgtacccgcgcgtgtccttgcccgacctcacctcccatccccaacactccccgcaatggctgaggcaactctccacaacgtgccgattgtcatcgacaacggcagtggcacaatccgagcaggctttgccggcgaggaaattccatcatgttatttcccgtcattcgtcggccggcccaagcacccacgggtgatggccggcggcctggaaggagactcattcatcgggtcccgtgcacaagaactccgcggactgttgaagatcaggtatcctctggaacacggcattgtcacgaattgggaagatatggaatcgatttggcactacgtctacgaaaacgagctcaagaccctccccgaagaacaccccgtcctcctcacggagccgccgctgaaccctcgcgccaaccgtgatatcgcagcccagcttatgtttgaggcttttaacgtgccggccctgtacatgtcgatccaggctgtgttgtcgctgtatgcgtctggtcggactacgggtgtggttttggattctggggatggtgtttcccacgcggtgcctgttttcgagggtttcgctattccgaacagtattcgcagaattgatgttgctggtcgtgatgttacggaacagatgcagttgctgctgcgaaaggctggacatgtgctgcacactagtgctgagaaggaggtggtacggatgatcaaggagaaggtctgttatgtgtcgctggatccgaagcgggaagagaaggagtggatgaacagctaccacaagtctgatgctaaagcaatggactatgttcttccggatggtcacaagatcaaggtatgtctacggaaccgttcgtcttgggttatactaatgggcttgtctagatcggccaagaacgttaccgtgcgcctgagatcctcttcgatcccgagctcattggcctcgagtatcccggtgtgcatcagatcgtgcaggacgccatcacccgcacagatctcgacctgcgaaaatcgctatacctcaatattgtgctttctggcggttcaacactgtgcaagaacttccctgatcggttgatgcgcgagatcaaaaaactagccgtcgaggacatgaagatccgcatttccgcgcctgccgagcggaagtacaccacgtggattggtggtagcattcttgccgggctgagcacgtttagaaaggtatgttaatccctcatgtctacttcatcattgctgactaaatactgtctagatgtgggtaagcgcagacgaatggcacgaggatcccgaggtgatccacaagcgatttgcataaaggcctcgtctctgacgaagtctttgatatcatggtggccttctaccgagtcactccggatcacatcactgcctccaccgcgatcctaggcaccatctcccattccataacaaacaacacaagaaacagatcttgtcactggtcgatcatcatgcaattggcagtgcataagaagtgatcgaccaacatcacaatccgagtcgtatcctgactcttgataccccagcttcaattttcttccagcttatgtcgtctggcattggctctgactttgcaaatacagtctctgcgtcttggggatggttctactctagacataatttactcggacatactacagttctcgtcatggattccctgcgtagattgattagatccggtagatatatttgcattctacttggaatatttagtgcagtggcagtcatctgattcattccacctctgactatgggtaaataatgccgatgttcattctccaattctccttctcctattcatagttatgactcaactacatgtagtcatagtctcatagattggtaaccaaccaagtacccgaagtacccggatggaagtcatgagtaagccaaggaggcaatttctattttaaacaaaggatcctattctattaacggttgcacgtcttaatagagaacaaatatacaggcaaactatgaaaaagaacacgcatgtcgccacgtaccaaaacacaaagtccaaaatatcgaaaccgaaagcgaatatcgaaaccgaaagcgaaatccacatcaaccgaataataagaacaaagagaatggaatattctagaccggagatcccaaataatactagtttctacgctgtacagacagacacctgtggatatccccaaacatcatgtccggctgtcatcgcctagcagcgggtacgacattacacctgacgtgcgagtatattcgccataggtggaaccgcacccggcaataccacaacaagcacgtcttgaaagtacggaatctacggctacaatgatgtaattggagatatttttgtttttttggagacgtgtaatccagccagggaagacaagaaccccaagcatgtattgtattttgtatttggtattgtgatttgtttagacccatggctaggaagtagtagccctcggaatggcgcaatatggggggaatattgttgaaagcagcaaagaaatacagaaaattgcgacacagagtagagtaagatggagcaatgggaaatgggtaatgggaaatgaaaacggaactccggaatgatgcaaccagacaagtgttgttcgatggcgcgatcttgggtatgttgaatttgagactactccgtagaagaataggacccggtttccagaacctggcgttgatgcagggtggtttggctctaggcgcaaatgaaccacaaagaacaaagaaaacgccggtttgcccatggttgagagtgaagaggttggagtttcatgcggaaacaaagagatggtgagggaattcgactcggggtatttccatagacagcagaaagaaacatgacatgtagtagtagagggtattgtcatcctcgatgtttcaatccggtccgatggaaacccatattaaaaaatgagaatgagcatgttaaagagagaaaaggcaaagaactttttttgtcgttatgtcgttggtgtaggatgtagaaaagatatgctctaggcagtacccttcagcttgccccagcccttctcgagaccacgacgggccatgtcacgagcccgatctgccacggagccagtgctggagttggtagccgtactaccagccgagtacttgcgagtcagaatagaattgctgcagtcgtcgcggaagatggtgttgccggcaccgccacggccgacgtggtagacgggggcagcctggcgcaggtcacgctcgagctcttcgtcgaagctgaagatggcgcgctcgctgctgctgtggatgttgccagcaccgccacggccggagacaaagctggttggcaggcgcgagtcgagacgggcgagagaggctggtccactggcgctgcgcgagtcggtggtcttggtgttcttgaggttgacgacgtttccacatccgccacggccggtgtagactgctgggcgaccggcgtgggggacagatgggtgcggctcaacgacgcggtaatttgaagaaggcatgttgatttgatgtatggtggttggggaattagaagtagatgtagatgtgatgtagatgggatgtagatgtatgaacagtctatgctgtgaagggtattgaaacttccatgaaggatttgcaagatgtgtggatatggctaacaaaccgcggggccctgatgttatatagtcccagggcccttttttgacattttcacgtttttggagtcatttccagatccaggcacgacatccagtcacaaggccgtgtgggggctttttgtttttttcttttttctttttgaattttcattttgaattttcatttatccctttccttcgtcgtcatcagcctaaaccagccagggatatttcccctttcgacccccctgtgatctggtgctacaatatgattggctgccagtctcccccagacaccctaactctggctgctttaccagctgtcctctgggcaacccagtcatctgactggggcggctccaccaatggtgagtggcaagacgtaacaaaaactggctgggcagccaatcagcatttccattacccccaggaaatgcagaaaacctctcatttcaggatcaccgagtgtccagatcctattgctttccaatgtcgagctcacgttgttctgggaatcacaccgcaacagatgggccatttcacgatcacgtcaggtgttgcgccattgggcattagatacaattgcatacatagaacatggtatacatcgataattgtatacattggataggatggaggattgtagtagctagtagaagtagctggttgaacctgaatattaccaatactcacgatgtattataaaatacataccaagagaaaaggtatttttctgctccagcaattgcatcatttaccagcccgtgtccactttctatttcagaacatcaggggctttgtgcaacacatttattatttctgcatgtccagctgatggttgcacaggtatataatgtaagttgatatatgtatacagcatatactccgtatactaatagtagttagttataactatatggtcattaactatagtaaaagatgaatacttaagttgccgatgaggaattatgctaaattgcacatctattgtagatcgcctgtacgatgactccatcgcgctggcaaatttgcgggatattctcccttggccccgtagatccaagtctagtcggctaggcttgcacggtacctgcccaggaggtgtcttccataattgactcaccgtaagtgccgagtaccctgcgcactgcgcacgcactgtgcacgtaagaatagtgtcaggccaacccctcggcagtcgtccagctgagccgaggagtccgagacagaaaagggaaagtgccgttccccagacaaaacacaaaatgacgttgcaaaagaaaaaagaaaagaaaagaaagaaaactcttcctccctcatgattggctgaattatccgagcggccagggaaccaaatcaccgcccttccaagattcgatgtctgtgcgtttcgcatttccccagattttcctttccccaactttttctgcgttggaccgagtcatgcgtctcggagcgtgatctttccagccctggatgccgaggaacccccgcttaaggggtaggatgcagaggaatgattccgcgatctcgtgggggcttggaatacgtgtctggacgtgacacggcgcttcggagtaggattgtcaggtgttaggttcctagaataatgtgccgatctcccacagggttagcgcctgacttgataatcttcaggggaacattccattgcccctcacatagaacacaatcctgttatgtcgagaagagaattactgtacagaatacacaccctcaaatgactagcgacacacattataaacgattgggtaaggccgttcttagtaggcgctttttcacaatgtaattgatctcacagccactaaatactgtaagccaccctcaccgtcagccacagtaaaggtctgtcacatgatgccgccggctagtttcataaagctactcttggacatagtcaacattgcctagaaatgacacccgaggaatgatcaaatccaaaatagtgatttcttcttttgtaaattcagtctacctgtcttagttttttttttactcccaccgttttgcttcaggccgacggagtaataaccgcactctccacgctagacctacccaccaggtccgcaaacatagacggccgagccagcaaatcccgcggaggcccatactcagccaacctcccctgatccaacaccgcaaccacgtccgaatccataatcgtatccaaccgatgagcaacggtaagcaccgtgtagtcctggaactcatcccgaatgatcccttgcatgacctgatccgtctcggcgtcgacgttgcttgttgcttcgtcgaggatcagaatcttccctgagcgcagcatcgtgcgagctagacagaatagttgctgctctccctgtgacaggggctgctccttcatttgtgcgtctaatccaccacgcttctcgatggcgtcccaaacctttgttttcttgagagcgttgatgatagcttcgtcgggtaacttgttgctggggtcgacgttgattcgaacggattcgctcaagaagaatggctcttgtgggatggcgacgagacgactgcggactagctcccgtggcagggtttgtaggtcgtatccgtcaattgcaatacttccactgtcaaggtccaataggcggagtaaggatagcagaagtgagctcttgccgctaaattatcacctattgtcagtaaacaggagattcctggggaaagaagatacccaccttccggtccgcccacagatgcctactttctggccaggcagtatagacatggagatcttcttcagagctgggatggaggggctaagtactggtcagtgtcgtccatagtaaccaatcaaacctagcttacctgtaagaagccgaaatatccttcaattcaatagcaccatgctccggccatgtatccgggggagtagtatcttccccttcctgatactcaggtttgacagtttgctccaaattcttcaatctcgcaatcgctcccagcgaggtctctaattgtgtccagctgtcaatcaaaacagccagagcttggttgaatccgagaacattattcagtgccaggccgatagtgcccgcactagtcatatgcggcagtaagaccgccagggcaatgactacaacgccaactgccgcaacaaggagatcgagaacaaggttgagccagcattggatgcagtacatcaagtagaacggcctctgggtggtgtccagcagcttggtgttggtctcctggaatttctcctgccagccaaacgcacgaagtgtggacaggccctctagggtctccaggaaatgactgtacagcgggctccgggactcgagatcgaggaatcgcagttggcgcgacgtgcggaggtagaaccgctgcagccagtacacggtgacggcacagattggaatacaaacggacatgtaagatgagcccatcgcgataagtgctgtctgggaaaggatttggaaaatctctgtattctggattagcttacctccatgcttataccaccctggagagatacttacggacaaccatgcgaattagacaaagaggcagtacccggtcaatcaaaccgatgtcctggctgaacctgtgtcatgttagaatcgagtcatctactactttcagaggccttactggttcagtatcacaccactatcggtttttgcaaagaaagataaaggcgcgctatgcaagattagcagttgtcagctttaagaaagaccttcgcccttacccaacagcaacccgcaaaaggattcgatgaagattgagagaggagattggcgacatccagatcagagcccacctgcaccaattgttagactttcatctcaatttccttttgcgaaacgacacataccagaaggttagacagcgggaaagcatagcggcaacagccagaacaacatagacactcatatattttccaatagaacctccgttcacatttgtccaccattgaagccagatctctgtatactgttagcatccgagtcggttcatctagaacagttcgactgaactcacgctggaaggtggttgcaaaggtaaacaacgcagtacaagctatgaagccaaatgtccgaggccagccaaaagatcggaagtagtacgcatagactgccatgtcaccagtttggcgtgttagatctgcatcatctggtcccggcgccttgattttcggccgtggtttggaggatggctggggtgcactggcgacgtcctctgcactgaggacctcctcacagtcggaggtcgctatatctgttttctttttctggatgtcctggccgctcaaaacctctcggacctttccctcccgagttagaacgataacctggtcggcgatgttgagatggcgcactggaaatgattagttacgtcttcaattataggaccgattgtggtacataccggagtgagtcaccaggaggatagtagtctgcaaccgccgaagtaatccttgctcgccgaataagcggtctacgaccagtgcttcggtcttctgatccagggcactcagaacatcatccagtaaaataatactgcgtctagcgtagaccgctcgagcaagcgcctacaaaaaagaattagtggttggtaaacgttgagtaggatagaagctagttgaacgtactactctctgcttttggccgccgctaagggttactcctcggctcccaactacagtctgttcggcatgagggagctgcgacaggtcttcttccagagcacaggcatgaatggtagtctgaaaccatacatgatcaattttttcctcgtcgcaaaacccgcagataacatctttgatggtaccattgggcaaccaggggctctgagcacaaaaggcaatgtttttggtggagacggcaatagtgcctgcgtcgcagggtagttctcccaagaccgctcggagcagtgtcgattttccgcagccgacgggtcccacaaccagcgtgagggagccttctggacagtccatggatacctgacttatagctgggtcgacggttggtgcaggccggatcgtcacttgctgaaccttaatggtaggggtcgaatgggtagtagtctctggcactttctcaccctcacgcattgtcccgttgggatggctaaggctcacctctaagcttgagtcaccactgcgagaaccaccgagtccagtgactccgcgactatccgaacctgctggagcacgaaggaatttctggagccgatcaaagcagcctttcatggctgcagactcattaatcgcaaacataaggagggaggcgggttgggtgaccaaagttataatggagagagacgtaaaagcctggttcgtggacaggctatcggtaccgcgagcagtggcttgtgccacaaacaccacgaacgtcaggacgggggcgaatatcaacggggcagaagcaatggtgttcgtccacaatgccagccagcgaaatcccatggcggactggatttccttgcggcggtactcctgcacgctactctccaccacttcagtcatgcccatgattttcatgctcttcatcgaacccagcatagatgccgtgacggcaatgcgtttctgcacagccgcgttccagaccttttgctttccgacaattaatttggaaagttgcgagttggcaaaggtgcacactgcggtcggttagtgttgtttcaaacgttaataatctacaaggataggagctatcaacataccgacaatcagtccaatgggcagcacggccaccgcgcccaattgatcaaccagcagccacatgccgattgcaatctccgtgatgcgtgcccatacctcatggatattttgtaatcccacggtgacacgatcgatgtccgtgctcataagcgtaagcgcggccgattcatcgtacgagtcaggcatctgcaatgtctgactgtatacgagactgaccaaagagccccgggccattgcaatcattctgtacatttcacgcttgtagaggacggtagtgatctatcgaaactcagcatccaggatctcccacaggtcgagaggggtgcaggaacgacttacggcaatactgatgtagactaggaaagcagccgccataagccctaaggcatggctgcggagttgttcggaagccggggcttcgacaaaactgataacacggctgatcaggaatggttgggcgtatgtgaagccgatcttggccagtcgcggtccgacggccgacaagagggcccatcgcatgcatgagatagtggccatgatcaacgcgtagggtgaattggagtgcgctatagttttcgttagccaaatgatcaccgatggggagcattcaagtacctcgacgggcccagctggcttgcatccgttctcgaagatggaaggtagcgagtttgctgtccatcgagaaaagatcctcgattgatagcaaacgggcaaatcccctgaagaacagcggattgagccaccagaatagggtgcgcgcccacacatttgctgtcgcttcgggaggatggtggcgatacggcagcctgagttcatggatcttactctgtgcctcgaacatgagcagtattaccttgagacccgtcgctgcagtaaataccgctgccatgggcgtctggtcccccatcaggaagagtgttcgcgactgggggatatccaggacgagcgaagccaagagaaagactcccaagagggtggaaggccgaatggaacgagtatgctccatgtaggaaagcagacagatagacagcgcatcgaccaacgacagggcggcagccgggatggtcgcgaccgtttggacctgtggatttcgaacccataacactagtaaggcgacttggacaccaaacagagcaacagcggctagtagcttgctcgagcacgccagggagaaggagacattggtcttaaggctggtgcgagacagccagtataatcggaagggaacgataaggagcagcagggccgaaggagcaatagacaggatggattgttcgaaggtgagggtgaaatcaaagcctccgcggcaccgggcatcgatcgaggggccaaaatggagatcagcagcctgtgggcagagatcccaagtatcggaagcattcagcgccatggtctatttctgatgaaataagaaccatggactgaaagaaagaagggttgaattcacgcgagaacggagagaacacagatttaggggaagtgaaacaaagagacgcgtgcttacagggtaggtggaactagtatctactactacgtctgctatttatttagtaaaaactactaattctgtcttattctttatcgacatagagtcaaaattaacaaaaggtcagtataaagctagtaaattatatatactagaatgctaacagacctttaggttttgctatattggaaaccttctcaaggtcattgtcggcccgttgtcatcgcctctactatacagtgtactgcctcacgagaccatgccactaccgtgcagtccgagccaatagccatcgttggggctgtagatcccccgggcagagcaaatcgacgtcaaagctctgggagctaaggagtccgacgggaacagtttttagcttctaccgatattaaggcaccgcgttcgccattcctaccatgttttgacgcgcaacttgtcggaataaaacctactgaagctaattgtattggccctcagtatcgtctacgccttgaggccgtctagaatcggttaactccgttggttgacggctgagacagcggtctatgttgggttgatgtggggggaatatgatcggccgggacctagactccttccctatgtagtacttccggaagcatcgaagcatctcgaaccgtctcttatttctttgactggcatggttgtagacttagccgacatctatcatctatgactaatttcttagcagttcaaaaactaagggcagaaaaggtcatatgatggttatgtcattgatgggaatagttaccagatcagaatatatattcaactaggccaaattgaactggtgtgtagatagggaaatagtcggtttgggggtgtacagtagttctcttctaatttacatcttagagccctccaactcctccaagcggtgcatatccatatccttctccaacagaggaatgacgtaggggtcgaaagtcttccagtaagggttgttgaggtggtactgctgcgacgattcctgggcgtagcgctcgacgatggtgaaatcctgcttgtcgaagacggactgcgacacaaaccaggagagggtttccttgtcgttcgagtagacgttggaagcttcaacgagcttggccttgagcttggagatggactcttcgtccggcttggcacggaggtctacgactgtcagcgttgggaatagcaagacgaggggtatcacatacggacgacgattgtgtaaaccatgattgtttagaggtgaatgatagagggattgaggggcaatggacttggaggggaataactacttttacgaatttagtcatcggtgaattatgcagaatggaaatctccgaaatttacccggccgggtcttgatgtcttgataagcttatttccattccagtatctccaccaagctccaacgatcatgaggtatttcttggacagaaagaatcctaaggagacatgcccagtttcaattctcagtcctgtgagccaacctagcaagcaggctcatcacctgcgttgccaaatccggacacttaagatcggatgtcgtcacgagcctcactgccaggaaccaccttgctaaccatagcgtccgcgacacactgcatccactggtagggctcatcggcacgaagacggctggagaacgagcccttggccttcatagcgagaatggtagtcacaaactgcaccaaacgcgagacgtagctcgaattgagtctctccgcgccggtgagatcaatgatgacctcctgcacattgtgtcccgccgggatagcgcgacaagcagccctccaatccaagttgagggtgatgaactccaagccctcggggtgggtcacgtagtcgatgaagacgccgtccatgctcgggtacgggaacggcagtgccatgaagaactcgcggacctcggtcggcttgttgcgagacaggcggcagtatccgtcgccggacaggccgcggaggctcggctcggggaatcgtctgccgatgaaccggtgcaggggggcgaggcggagcttggtcgcggttgcgttcggtgcggtgctggcgaggtagacctcgaataccttggggtcttcgaagacgaaggttgggctcgtgacataggcagggagctcggtgagccgcactgacatgcgcagggtggaggcgccgatcgggctggccacgaggtcgccgttgatgagggagatcagcagctcggtgttcaccgtgaggatcttcatcccgttggcgagttggtcaatgttcattgtggcggttgctatttgaaggaaagtgatttgggaacttggtttagggaactggttgatggaatgaaggaaggactaatgtaatgcgacaggtcgtgtgaaatttatggcgatgtgaatgtgtgacgacgtaagcgtttgatgcgttgtgaacgtttgatctgatgtatacgttgtcgcgatgtctactgtaggtgcacttcctgaagagtctttccaatttgcgaaagagcgaacaaatatgaatagcgatctacctgacttcattagatgttaatgacattctattccccttgcaatatcccaacctcaggaacttccaagctgaccatctgacacccagtgagaaccaccagcacatcggtaaccaccgctttgtttaagccatttaaagccagcaacacagactcccatagacctcagcttcatctgattagcttgttccttgcggcgagcctcggccaaagcctcttgctgcttgcggagtttctccaagatctcttcctgcctcctgcgttccatctcaagcttgagtcgggcttgttcgaggagtcttttggcatcttcgtctgcttttcttttggcctcttccagctcccgcgcggccttttcctcctccgccttcaattttaatatctcctgcttctgcttctcatattcctctttcaaacgcaagtactctttctctttggcttctgctagagccttgtccttttcgagttgatgccatacttcatctgtaacatcggcatctcgctttgcagtggcagtggaattctctgtcttgggctctgtcatgtctggttccttggaggcctcattctcgatgaccgagctttgattgtccagcttggtgacaggcttactcaaaggttgagtgcgtacagccaggtctgtttgctctgccgcttggatcgcagttgatagaccgttttgcggatagacttcccggctggaccgctcattgatcattgagtcgagggcttcgagcaccgtgtcttcgctcagcaccagcttcttcccactagatgacagaagagtttcgcgaaagattgtcttcgtaagcgttccgacgtctcgtgcatttgcccagcctgcagatttcgcaagtctgtcaaagcgctgcgacattcccttcataaagtcaaaatctggaccctccaagcagactagatcgaactgagcctgtgatttgttgaggaggtctcttttttctttcaacaagagctcgtaaactaagttgacacagtctgctgaggacaatgggtcgaattgaagagactctgggaagcgactggtgagccccagattgattgacatgagacggttgatgtctccatcataaccggccagaatgatgatcagcttttgagcaaacttgggcttggtaatggcatccacaatctcatccatggcctctttggcgaaatgtccctcagcgagccgataggcttcgtcaatgaacaagacctttccaaggccacgttcgaggacttgcagagtcttcgggcctgtctggcctatatattgacccaccaagtccgtggctgaggtttcgaccacttcattcgaagctaacaagcccatgtcatagtagacttgccccatctttctagctgtgctcgtttttccggtacctaggatttaaatgtcagcaatattcggcggacaaatactgaacggagaggtgtatacctggaggaccacggaaaacaaagttaaacggcaactgcgtgcgcggatccaagtccagtcgtctaaggctctgaaccatttgccgatagccttctagtttggcaacgatactttcacatcctatgacgccttcgaacatctttgcaacactttccttcttatctgcacgatcaaagtcttcgtcaaagtcagaagcatcaagcacagaatccggaatagaaccggggtgtttgatggacgagaggcgcttttgataccgcatcttggcggcgttgagcagattatcaatcttgcctgcatttccaaaaggcggtcgattccgagcacgctcgagcatctccaataccacacagcggccacgatcatttattccaaacccttgttctttgagcttgaggtccaaaatcgcatccagctcactcgaggtgaagtcctcgaagacaaatgcctggtcaattggaaaacgtcgggtgaggccagggttgaccttttgaaacatctcttccataagatccttgtaacctagaagcaagacgcacctatcgtcaccaggtgtgctttgcacttctgccacgatggtgtctatcacggcagctcggtatgagtcactgttggaacctgtcccatccgaggtacctccagagaacagtccataggcctcgtcgatgactagaacctttcccaatgtagatgcaagtatccctttggtgttcttttcggactctccaatcacactgccaacgaagtctgacgggttctttaccaccactacgattgtcagtaaactttatagacagcggaggagcccacataccttcgccattggacaaaaacccgatatccacaagtatctgaccgtagatctttgcgatagaagttttccccgttccgggatttcccaagaaaactttgttgagactgtactcaaccaggggcttctcatccagctcacgctggtagttgtatcgcatggtgtctagtatggcctccaccgtcttcttcacagagtccaaaccaatcatagtctgcagcttttgccaagcattggatgatttcaaagcctgcgatggatctggcccgatcatgtcttccttgctcagaaagagattatcaaccttgctcgcagcctgtcgtgtttcccggctgagacgtacagcctgtcgttcagaaatcttggccatggcattctcaacggctcgtgcattggcgaatccctcacgaccacgtccgctcccaacccgacgagctacaatgcgacaataaagtccgccaaggttatcctcgaccttcatctgctttttgtatttcttttcgatgcacccgaccaaaatctgcatcaactcggcgtcgtcgaaatcatcaaacttgagctcatttgggaaacgactaggaagcccggaattgtatgcgaagaacttctccatcggtcgttgatatcccgcaagaatgaagaccacttttccggtgaggttttcaatctcagctaagaggaagtccagaacttgggggccgccgaaactgctgccgacgagctgatacgcttcatcaatgaagatggccccgccgccgtctttcaagaggttttcgatgattttttgacatcccgagacaccatcgttcgcgagtctagacccggttgtctcgatgaatttgtcgccgggaatgatccccatggacgataggaacttcgcgtatagacgcgcaacggttgttttcccgctaccgggattcccgagcaatacagatccgaatcgatcgtggctcatatcaatgttctgtctaattgcgacgtccactttagctttgatcgacaaaaactttgtcttcactgattcaagtccgatcatgtcgattaacttgtcgatctcctggctttgagcgttgaggaacttcttttgatacttccagtctgcttgagccgcggacatcttttgtgatggcatgacttgtcgacttggaggctgcacactacggctttgagtgcctgtggcactggattctgagcttgcttccgtgatggttgcgggcgtgctaggaatggccccagagctcaatttccgctgaggcgatacagggcgcggaggattcttcaaatcctcaatttcctggcggtactgttcaaggaccttcgctcgctccatatcatcgaattcatcgcgtcgcacacgcttgagatgagaagcctcctcctgagcctctgcaagcttccgggcgtactcgctctgctttctttgccgttctatctctagtctgatatcgcgtttgcgcttgcgctcttttacctgatcttcttggatgcagaaacgacatgaacccttggcctgggaacaggacagagacaaggaatgaccgcgggaacacttccatttaactatttttgtgcacttcatttttgagtggtccagaagctggtgacattttgaggggcactcgtgtactccgcaactcagtttcacgccgctatgggaaagtcagtattaagatatcagcaaaagttctggtaaacctaccaaggggcagagcatcctccgtctgggcattctctatcgaagtcctccgctgttcggagaatcgaatttgtctgcggatgctgttcgcattggacgggcagtccatcgtatagatgcccctctgacttcagttggtcgattagcggcttccagtgcttttggcccttccgactagaaacgaatgtttccgagtttccaaccataatgaggacatttcgggctcgggaaaggaggacgttgaggcgctcgggagctgccatgaatcctatgtcgccaacttgattgctgcgggtgagtgacgctatgactatctcactctcttctccttggaagttgtctattttctcaggtcagactttgcttgcacctaatttcttctccatacttaccaattgtagacagcttgattggacgcttcgaatgggaggcaccagcctgcgacagaagacctgctttgacaaggttgtgggagtcgaggtcattcagaactgggtcgttctgtttgcttagagtctgtctcagtagactaagctgacccaaatatggagtcaacacgaccagcttgtctgttccatacccctgctgtccgagatacttcacgatcttgaggacgatctctgcctcgaatacattgctcttacttccctttgagttctcgtcgtcccggtcagagacctggacaaaaatgtcttccggattttgatgatggaaaaatatcactctgtcgcacagacctcgtggctgaggacgattcttggtctttttatcgtcttccagcccaggataggtgaggttgcgcacaagacttgagatctcgggacacattctatgttgcttggccagtgtcgtatgtggaaatccgacatgtatgagtctttcgaaaagggagacgttcaggtcatagccatcgcctttctctgtgctcaagctgtagctgttgatttttggccgtagctgctgatgatctcctatcaagatcaaatgcttggtctccggtgtcattgcggtgagcacatgcgactcaaggatctcacccgcttcttcaagaagcacgatgccaggggaagcatgtcgaatgtcctcggaatacattgccgccgctgtagtggtgcagccgatgattcgctttgatttcaagatttcccggtttttctcacccagggtagcgctcagttggctttggcttttgttgaacaatgctatgctaacgcccaaagactccgcctgttcactcagcagagctttcttccaagagctgtttttctcctcccgtattttctgatcgagtgcccagatgtcgtgacaatgagcgggaagaagatcagaacatacccctgcatcctggttgcggatccatcggtgataaaggtagtcttttcgaattgcttttccactattatcgaccacggccatgctgtttggttcctccggctccggtacggtcagagctgcaaagtattctggttcttcaaactccagatagtccaagatagatgtagcattagctgtgagattcttgtaggcttggaaggagtcattcaaattgtccttttgttcatttgcgaccgcttcgagtgaatgaattgtgttccaggtggtttgatccctacggtaggacgagtgctgcttaaacaacccaagcggctcggttcgttgtgaagacttggacccgagtctgacgatagtagagggattgataccaacgtctagtaagtcttccaagaactgatccaaggcatgatttgtgtagcacataaccaggattttgtctttcgaattatcgtgcagggcctttgcgagaagagcacctatgaacgacttgccggtacctagagctcatactgtcagtttaatgtcctcggttatagaaatgagaagatcatgagaggatactaagatgatagtgggaggataatgagacgatccacatgatcttacctgggggaccttgaataagactcactctctgtgtcaacccagccaacagagaatctaactgtgaagagtccaatgtcactgacatcgaggttttcagggtgcgctggatattacatccgcgttcttcctccagcatgttgaccaaattccgaggaactaggcttgaatcctgcaccggctggcctttttcgtaaaggaacaactcctctgtgagaggcaactcaatcctctcctgcaagcccttcaaaattggctcgtatgcaaacattgctgtgtcaacaagcaggaattccacgtcattgtagagtttcaggtaaagtaatgactttttaagggcctcttcacctgtaatacgcagcataacaactggcattttgaataacagttcatcaatttctcgttcgattgtggcaaaagccacgatatctgtgtccctaaccaagcaaccaaaagcacgatgcttcacaaactgaggcgtgctgtttaagaaggctttgcgagcatcctctgagaggttcttgagcttttcaaggccatattgggcagtcacgccgatcgtacatggtcggaggtagtttggggttctagcagtgcagcggacatgagaaagattgagatttctcaagtggaaagccgagcgtcgccccttctttgtgcctgttgcaatttgcaagtcttcgcggagctccgagagcatatcttctcgcaaaaggcgaaactgattgtcaacatggccggcaatgcgttggccactggacagctgtgcgatgtcttcagcacggcgataaaagggtttctccgtacatcccatctcatcggccgtgggaaggatggccgtcaagcgaaaatcagcaaaatcattatcgtgccgaccacctgcagtgatctcagagtcttcgacggtggttgcatgtgatttcatctccagaagatatctaatcttgtggcccaagtttcgtatgtcaactgagggggaagagaaaagcgacccatccttcaaaacagtctgagcatcagctctaacgtccaccctacaagagggaggcaacgaaagcaactccgccatcaaccagcatagagtgtgggtcgcatgatcctccagtttgcgagtacggaacgcctccagaaatgcaccccagagggtgcgcggctccaagataatcagaagaagctgctcgagaaattggccgttgcagaggagcttgacttcgcggtggttcaggtattgaataaacttcgcggtgtacccgttgatgaaggtcggggttaggttaaacctcagtccatttcgcaaggcattcagagcgctttggcttgagatgattcgctgaacgacaatgctggggtcaccctggtccaaggttgcttcgataaatcgcttgaaactgttctgatcctggacttcgtgctttccctggacaacctctttgaaatatttggccagtcgctccgatcgaatattttgagacatgatagcgaatgagacttaacatagattgcaagatcaaagtggcagagacagatagaataaaaggtgtagaaagatatcagagtcgagagataagaaacagtttagattctgcattgccaacaaagcagagcacagtgagactaatgcagatgcagtctgccttgtaggcttttagctgataatgcgcagttgggctatgcgcagcaaaacccaacaaacgcaagaatgcgcaggaatagaccaatgcatgaagcacagtatgtgacgtggcgacaggggtctatgcccccgcagcataacgtgagacaacaaacaaaaagtacctaaggctttttttgtatctgtcgttgattgttcttctgcctacatacacatacttcgtcgtgctgcttcctgaccatcagagtctaccacgatgtctccacaaggaagaggaagaggaagaggacgaggacgaggacgaggacgaggacaatggagagaaagagggggagtatatgcagcccagaccagttcaccagcacctccgctaggagatatcattgtcacaatctaccacaatgaaatcgagagtccggcacctgatcaagatgaagacatatctcgaatcacgaacagtcaatatctgacatcctacaactggcttggtgggaagaagagaaagataatcgttccaggtaagaggataatttccgataaccaaggcactgttcattaccattgcgttaactgacatattcctaggtgaaccaccaaagtggacgcctctgtccgattctcccgcgcttccacaagacaggggtgattattaccgtgatcgaaatgccgcacgataccccacctatcctctggagccaatggtacaagcaatactcacagacaaccccgagttccccattaccagtgtggacatcattgggtgcaacagtacaatggggaacctgcgacgctttgcatctgggcagggtaagccctttaggatgctagttgaggtactcggcaagacagtattcttcatcagaagggaaaattcgcccactgaggtgtttcccgatattcacggttatgggcatactttcccggaagcatacaccacgtggaatgcaagtgtgggcggatccctgtcccaccaacgggtgatgaagtatgattttgccggaatgcagtgcttggtacgttttgaaggggacggctttttgcccgacctggtcctggataccgaaaccgaaggacatcctgttaccccgaaggatagtatcgacccagaagctttgctgtccatcgagaaagtgacaatttcaggttacccctctgccattacagaaatggcaccggagcagcttgacattgcaagacaaggccggcgcattccacagtgtgcagtctttgacctgaagactcgatctcacgctaaaaagggcagtgacattattgaggaagaactgccccggttgtggatttcgcggactcccaacttcattctagcccaccatacagctggtcgattcaagcatattcaggttcgcgacgtgcgggatgatgtgaagcagtgggaggagacccagcaaccggctttgggcaagtttgccagcttgctccaaatgatcgtggaattcgctcggagcgcggataacggaaaacttgagattgagcatgaagagggtgagcaagttttgaatctgagagaacaggggggagttgttcatggcgtcttgtccccggctgtcgcaagcaagtgggatatgtgaaccggctctctcgaggataattggtttaagctactactcttagtttgaagcttgctctgggatgtaaatcagttcaatacaatccaatctattcacttacaacaaccgactgtaaagccatcagtcttgccaggtgtgcgcaagtatggcatcaaggctggcattagaaagcagaagtgtcatatcttgactgttcatggtactgtttaacaattcaacttagacacagccctagacttgagggttcattgccatgcccggaatagcagagtgtgcaagtgtagtaatgagtgaatgaatatcgtatatttttcgctgaagggaatttctgcctcaatttcaagtgctgatatggagttgatggagcaactgtactagcaagttggaattgacatcattatttcggtcagaattcacgcccttgccgagagatgcgctgtcttgtcaaggttgttggagagccgataagccactattttgccacttcagaccgcccgacaaccctcaccaccgagctcctaacaacttgccgatcctactatctcaatttctctcttatttgcgtcaccgaggtttgacttccgagattctacctcaaactacgctattgaaaatcaggacagtttctgctagccaagatcttcgtctctgaacgagacccatcccgaaagggaattttcctttttcgcgcgacgacagcaaggtacttgctgcagaaaccggcaatatgcccaaatataagtagcctctggtctctatatttgcaactgaaagctaacttcccatgcactcttctgtaggttttgccgcaaatccacatctagacagtgtcatagcctattccgggcatgatgcgacacgaggctatgcgcctcattgcggccggctgagcccatccatcgacatattgctgactcctcacttcaacttctaggcgactactgtgatgtctacctgacacacgactcgatgagcgtacgcaaggcgcataactccggtcgaaaccacctgagaaacgtggtggactactaccaacgtacgtttgaccgatggcgcagcaaggcgcccaacccaacaactgaatgatagctaatcatgtgaacccatacagagatcggccaagaaaaggcccagtccgtcatcgactccattacctcctcctacgccgcagagggccaacaagcccccaacatgatggcccccagcgctttccctcctcccttcggattccctggtatgactatggctcttcctcccgggactccagaacaccaacccgaaaccgaaatcaagctaacgccactaggacaaccaggcatgccccctcctcccttcggtatccctccaccaggcgcccccggcgccccaggcatgctccctcgtatgtcacacccacttccacacccacccccactctggcttcccgaggaccccagccaaagatatctagcctacccaggatcataccaagctaatgactatgcctcttacccagcccacggccttcccttcccgccgcccttccctaacgccaccggaaccccgccaacaggcggcttccccccgcctctccccaacatgccccagggcgcaaacttcccgataccgccccctggtggcttcccgaacttccccatccccccgcccggcgttgctggcttcccgcctattcctggtcagcacggtatggcgccgggtggtccatcgcctattcctaccggcccccgtggcttggagggatatcctcctccccctggaggtggacctcctggtgggatggatcaacggtggtgattatgatcacgatcttggggttgattcgcacgtggattgtttctgataccttttttttcccgtgcggatcgtcggcatggcatgacatctcatgggtctttttgctctttactgttagtgtaaaatagcggtttctttttttacgtctctttactgttctgttcgtacgttctgtttcgtacaaaattgtcacttggtttctagtcgatttcgaaagacatggcgtctgaattctttacgatatacatggcactgaaacttgcaaaagaaaaacttcgacatccacatccatgtagacatcggtttcatatttacactaggattatctccagaatactggtgtataaagtgagagatgctgcccaggtgacgaccggagaaattggaatatatttcatcggcagcagacatagtgcaaagccaacaaaaagaaacgagaacccccaaggccaatcaccatacccaaatgcatcaaagaacgcccagcggaagtgaaaacaagggaaagacacggcaaaaggatttagggagagagagaaggagaaaagaagcgaggagaagaagtaaagggaaaggaagggatagatgacaaaaaaaggcgcacaaccattaagaaatggagtggattaagaaaagaagtttatctgagcgacgaggatgctgcagacggtgcgcagaagcaaaaaaagaagagaaaagaaacccgaacccagaggaatggcgaatggaaaaatcatagaccatcggtatcccgcgctaaaacaaaatcacatatcttcatctcggaagcgacaaaataagagaccaatggcattttttaatgatcatagccagcgcctcgttgccaaggactggcactgttctgggctcgatatgtcgttgacaaagcagattggccaacaggagaggtgttatcaaagctccttggcgcgggtgaaggggaccggccgtaatggtcgtatccggggggaggattgtgatgacctgacgcgttgctggggaacagtggcacggatgggtcaacgggtgaccgaggcgcttgggcggcagacccgtgcagggagtaggtcgattccattgggcggccgacggtagcaccgtttccactggagatagaagcgctatcgtcgtcgaatgggttgttattattatattgtccaggcttcatatcaccacgtgcggtagcacccaaggcatccaattcagtggtgagctgggtttgggacttgatgaacgagccacgatcgtcgcgcataggctggtaacgagtgtctggattcttcgacacaacggcgtatatcgaggcgagcagaaccaagatcaagaggaccaaagaaaacacggcattgtaaacgaagaaaatgacacccataacaccgatcatcattccgggtgggtcgaacacatccgagaacacgagcaggaagatggagttgatgaaattgatcaccgcaatggagatgttgaaaacgttggtcttcttatccatccaaggacggagaatgcagaccgcaacaagcatgcctagctcaaggaccaccaaagccactgtttgaacgaccggtgcttcctggctcagaccgatgaacatacccttgatcaaggtgtagacgaggaacggaacgacaaagtagtatgccgttgctcggtactgcacatacaaaaaaccccacttgttcagacaggttgggtcggagtaaagaatatatgccgggttcttgtgcatggtaactgaacgctttgccaaacggatgaccttctgagaggcccaaccaagagagacgagcatggaaaggagcatgaccgctgccaaaacaatctcggccggcgagtcacgctgggtgaactcccagaggcaaaggatagacatctggggaaacccgatgagagtcaatcggaacaagataccacgcagtacgatcttccacccattgcggaagtcctggaaccggtcgctcttcattttgccatgcttgacaagtaactcagtaattcccttgaagagtgcaacgatgatgacgacaatgcaggtgaataccgcaaagaaaatcaggccagtgaggaaaatgttggtatcctccatgtccgcacggaatccaacacgatcaattcctcggatgacaagaagtttctggcttgtctcggctctcttgactataccacttcctcgcttgacaatcattggtcccacggctctcctcatgaggttcatggccgggtcaaccaaggcacgcttacggcgcctgaggacttccacagaagtatccgaaagctgtgataggactgtcgatggagttccaccggttgatcgctgataccaggtagcaatcgtctggatgaatcccacgcggatgatacccatgctccattggaagttctgggtccaagcttccacgatcgggggcatatcaacggaggtcatgccaataatcgcttgggactgcatgaatccgaaaagagagagcgcatttgccgcaacgtgggctgcggtgttggaatgccctaggccggaggtgatagcggatgcagcgagacctaacccggatataacagcagttgtccacgagactccggattgattaacggtcttgccgttggaaagtgaggcctcgacacaagcaatcttttcttcggtgtcggctgtcctgatgacaatccgcacttttgcgtcgagatcaggcacactgaaggcgataccagggatattggctgaagtgcctgctgggaggtcgagagaaagtggacccaaatccatgggtccagcggacatgggacacatacccatgccactaattttacaaggattaagggtgctctgatatgcctggtagccatatgcggtgaaggtcatctccgcaataaccttaccctcgatgtatgagacgccatcgaagccgaccacgagggagttatttcctgggtagaagatgacgctgaaatatgttgccgtgaagttgctactttccatgcacacgctgagtgcattggattcaaggagttggacggcagaggctagcggcgccagaaaggcgacgaagcaggtgagaagagatattacccgcatgttggtgtatattcgatataaggaggaggttgtgaagcactggataggttgccagtggtataccagggcgaggggaaatctgacaggtaccgtcagtggcactccagagtaccacgttgccagccgccggatgcggaaattttggtacggcggactattgttggatagccgtggggtcgacttattcctcgatgtctctttgcagacggaggctgtgctgtatgttttggcgcaaattgtcggaaagccagggttgaatccaggtgttttgcctttcactggggcatttgaatataagcggggcgtacaagtagttgtaaaggggttgatggaatcgaaagaagctgtattggtagatcaacgagagtgtatagcctgaatgagagtacggccgagtagggcgaaaaggcgaagtggtcgagagtgagtggactggcgatacacagtatggccaaaaaaaggagtaaaggagtaataggcttgaaatggtagaaagtggtttgtggtgaagataaacggtccctagattccagaagagaagaagaaaaaaaagagagacaatgagagaacgagggtgagagggaagagtccacgggttgttcactcagggacagtcgacaagggtccgtgggaacatttgaaagacattcgaggtcgtcgcccattccactggcaaggtatgtggtatggtattgtaccaccacaggggcggctatcggacagccaatcacagtgtggtattggccggtattggtgtttgagtttgtttcgtatgtctacccactggcaccccccttcatgccactttcaaggcttcctctatgtttcacttagtgtcctccccttctgccctttattgtttcactccactaacactatttatatgcatctaatcctcgattctccggtcaaagaaaccaacctcttcactttcggtatacgcgtactaacgctactgaaagcggttgatggatcgtggcggaatcaggcgggtccttggcccttggtcttattattagcagaagacaaaagtcgggataatgccaatattaagtattacactgcgccaaaggaacggttgcccccagctgtggagtgtgccgcatacagtggaccgccacgtacggactacagactacaatggtaactttcaatatcaacttaatataatgtatgttgtactctactctcctgggcattgcgtaagtatttcgtctgccttgtccctcgctaatgatgaatcaaatttagatttcagattcccaggtccacacctctatgtcgctgcctactccatacggagacggagtactttgtgaatttcttctgtcgggtggggcctcttagctgccgcttttatgagggcgcttctggattggcctgagtaactttcagtccggagagatgacttgctcgatatcacgtgattagaagtatggggaggttggtgctgatggacaatgtgtactccgtacagatgattcaagaattttgtttactatgctaaagagtcaagcagaactagcctatgaaatccgattttgattcgattgaacgcggctcatacatcaaatacataattcatttttggccgttttcaacaacctgctccgaggtggcctctcccagcgagagcaacactgccccagcttcattgcggtgcgccgagaccgcacgcctgttctcatatatggctctccatctcgggtattgcctagctggaaaggcacactatggtcgggcggggttggcaggtccggccatgtaagtcggttcggtgcgttgatatatctttccatgtccccattgcgtctcgcaacccattcattcaaaaaggtgcgggatttcgatacgtcagagtcaagttcacggttgcaagtccactccgatatactctgaaccatgtccatgtgttgatcccagtggggaatgctcgtgaagtgcgtatcgtttgtgataatctcgtatagcgtgaatacgacgccagtcccatcatcgcggctatctagcaagcgttcttttccagatacggcccagttgaagtcgaagagaaggatcttatttgtatcaggatcgataagcagattccggggtgcaatatcttgatgcatgatccctagttcgagatttaggaaatccacaagtcgggtaagctgttgtagccactcaaatcggaacggtacattcagattggttggatcggcgagagttccgcctggaatatactttgttgcgaatcctatcacccgagattccacgtcttcgagaacaacacgatcaagtggtactatattaggatgcgacggcagagccttgaggatgttgatttcgtcctaggccatccggatgtttaaaggccttgtatcacgttgaatttaaaggcaaccctctgaggagtcccagattcgtcttcataggataaaagatcaacgcctggtccaagtcgatcaatttcttcgagtttagagtaatagattgtacggcaattggaaagcagcaacgagggagcgctttaatcatcaagaagggaagttatgcaacaaataaagtgtcatcctcttttggatccattgagacttcagtaagaagcccatcatcgtggactgtaattgagcgaacttgcggtgacagatgatcggcgaattgcgccagaatgaggcactcttggttctcctctagcggtaacactttggcgctgcgtttgaccttgatcatccgtagttgatcccaatcccagatgttgcaatgggcttcggttaaggggttctctttggggccgaaatagccctgattgtcagagaggaatctttcttggggcttaatcatagcaaactaaaaaagtcaaaagctctgatttattttggctagtctccacgttggctgagtgggaaaggtaaatggattgcttaaccgcacggtacgggtgacttagtgggtgcggggacgatcaggcgcgcagtcagtgatacaacaggggcgtgctcgattttactctgagcaaaaggcggcaagagataaacactaaaatggaaggagagctaagagtcattggctgatatctttgccgaattttatgtttcttagttctagatccgggggtaagcctttccgaacactaatgaaatactagcgagagctcattaactatggagtactttgtagacattattgttcttagtctactctagggttctagagccgggaagaccgttggactctatttctaccattacaattccagagcacttccaatggtaatacacatgatatagtatacgtttctattaattttgagaagacacaagagaaaatatcatcaatagactgcagatgcatggtataaggatctacatggaaacatggaaatctactaaatagcgttcacacaattgcacagcctcgtttagcatcttcatctcggctcacacgtttcagaaataaagtaacctccatatgcatggaccattcgtgagcttggtatgattgtgtcaaatcatatccccttccccttttattacaaatttgttttattattcaacatcccctgatcaccaggaaatgatgatcagaacgatcactatttccatgtgcgcgtcataacctcttcatttcccgtataatctctgacctcaacgatgtataaaatttgtggtacaaattacaataaagggacctcgagatgccaggaccattgtacgatctagtgctagttatattttcgacgcgcttaaactatgggtggtctagctagaagttgtatagctggcttgcctacctttctaggtgtgaactaaacagaaacttcccataaggtaaacactgttagcacattgatctaacctaactaggataagcttaaagtattttgtatttttggctccaccgacattatctgattcgtggttgaatcattgaatatcattggccagaaatctctgccttggctgcaattggatttcgttcaaggtatggagcactgaggttatatatcactttgtttgtaattttatacttgtcttcagtctgaagcttcaatttgtagggagcaagaatactccatcatgagtggcttggtggtgtttttgagatatttctttgcccagccttcctcgaggtttctgggtacggagtatatatccctaaatgtcttccgctagttagtggtttagctaacactactactctgtagttaacttctagactgtcaagctagctaatggctcctatcggctcttcaggaatagaaacccggcttggctggtacctacaacaggtcttaaagtcagaattcatgcataaccacagagactctgtcggagcaaggatatcgaagaccattgcccctagacaaagacaaagcagcccagcccttggaataagacaaaaactgagcaggcactaacacatttcatacaacatacatagtcacagtaatatctcagttgcctaacttgaggccaacgtagccttgcccagccttgcacagccttcagactaacatcccgtccttgttccactaaggggaacccaccaggtgcgtatactgctcggcatcatttcatctcgggtgtaaaaaatgcctgatcattttcaaaatacgggagccttaaacttgaaacacatgtgatctttgtggtcttgaagtgtcacatccaggcaaggaacaatgccacaggagatggccaacctcgtgcccaaggtaggtgccttcgtaagcaggtcaataatatcagcctcattgttcaggcaccaactgatcgagtctatcaacacgtgatgtggagttctgccatattctaccgatcagaaaaaaaaaagtagcagaatgatttccgcccgcaaagatcaataatctagacctccaaaacacaaggtccaggttatacgagacaatccctgattgatttgttcccgtgtcaaatattacactgtcgcaggaccaatcaacaaaatgcctggccccgtggacaccgcgaagtccatcaacaagcgcaagagaaagcacggctcgaaagcagagagcgatgccgccaagcccgtggaagccaaatccagcccttcagtgaccccgaaaaagagtgttgcttcgaccccgaaggcttcggctgagaaaactaccaagaagcgcaaggtcagcccttcaccaagtgccgaggaagagagcgccgaggaagagagcgccgaggaagagagcgacgacgccgaggccgctgaagatgtcgaggtagatgcggaggaggagagtgatgctgaagactcggaggctgcgaatggtacagatcttccgactttggaagatgtccgcttgccccagaccgagggcaagctgcagaagttcactgagctcaacctttccgagaaaaccatgcagggtatcaacgacatgggcttcacaaccatgactgagattcaacagcgtaccattcctcctttgcttgccggacgcgatgtgctcggtgctgcaaagactggttctggaaagactttggccttcctgctccccgcgattgagatgctgcacgccctgcgcttcaagcccagaaacggtgagttttccccacacatttatctgatatttactttccattgagactggtggctaacctttgatgcaggtactggtgttctcgtcgtgtcccctacccgcgaattggcactgcagatcttcggtgtcgcccgtgaactcatggcccaccactcgcagacatacggtattgttattggaggtgccaaccgtcgcgctgaggccgagaagctgatgaagggtgtcaacttgcttattgcgacacccggtcgtttgctggatcacctccagaacacccaaggattcatcttcaagaacctgaagaccttggtcattgacgaggctgaccgaattctcgaagtcggcttcgaagatgagatgcgccaggttgttaggattctgcctaaagaagaacgtcagactatgcttttctccgccacacagaccaccaaggtcgaggatctggcccggatatctctacgccccggaccgctttacattaacgtcgaccacagcaaggagcacagcacggtggcgggtttggaacaaggctacgtagtgtgtgaggcagacaagcgtttcttgcttctcttctcattcctcaagcgtaacctcaagaagaagattattgtcttcttctcgagctgcaattgcgtcaagtaccatgccgagcttttgaactacatcgatctccccgttctggagctgcacggaaagcagaagcagcagaagcggaccaatactttcttcgagttctgcaatgccaagcaaggtaccttgatttgtactgatgttgctgctcgtggcctggatgtacgttccctaaccccattaccacgttgattccataattgactcaaattccagatccctgctgtcgattggattatccagtttgaccctcctgatgatccccgtgactacattcatcgtgtcggacgtaccgcccgtggtgccgaaggcaagggtcgcagtctgatgttcctccagccttccgaggttggtttcttgaagcacctcaaggacgcgcgtgtgcctgtcgtggagttcgagttcccggcctccaagattgtcaatgtgcagtctcagctagagaagctcatcggccagaactactacctcaacaaggtaagctatcttcccttattacttatgtgttaccttatactaacccacttgtgcagtctgccaaggatggttaccgttcttatctccaagcatacgcctcgcactctcttcgcaccgtgttcgacgtcaacaagcttgacctcgtcaaggttgccaagggcttcggattcaatgccccacctcgcattgacatccagctgggcgccagtctcagccgcgataagaagcaggagcaacaaggacgccgcacgtacggcagtcagcctaagcacggtgctggactgaagttcaagcggaagcacaatgactgagaacaatctgtatgaacatcaaaagcgatcgattgtctctgcatatttattttagggacattggagttcagcaatgtggatatatctatttgggtttcaattttgtccccttattctgtaatcatgagagatggcatccgagttaaatattcggtgggatagtcgaatgtatcttgcttatatggataactctcttctttgcacctccttgcgccttgtaccatggtttgtccataccgttacacggtaagcatatgctcagcctagaggtctgcccgatatatgtttggtcatctacatcgccgcaaatcgtacaacatctaactatataatgatcgtaaagcttattccttgtcacggaatgccacagccagcattcattgagccatgtgggattcaaccttttcccacgtggaaaggatttgacttcaaacaagaagaggagagctacagaaaaggtatgtgcaatgcaaatctctatactaaaggatccttactgaagtactccgtacatattggtacctacatgtagtgagttactcaaccccccatacccaccgaagcgatccaattggaagatgccaattctattgtggacaagcgatcgttgccaatgacaaagtcaagcagctcgattgccactaatgtacgagatgcagcaagtgctcaacctccagctgcgccagtagtctggatgtgaattgcttggacccccttgcaagcgctactatagttctgtccagtcagaggtgagatcacggatagttagttatgttgtaatgcatctggggccaaaagttgggaaatattgccggtgtattattgtgtatctgtgcgattgataggccaatcatttcattgattccaccaattccaattatcccaacatggagaagtcggcaaggtggaagcccgagcacacgagtgtgatgagttggcagacgctgagcccaatcacccgatcttgtccagggtctctgtcgtctgggcgacggtgtgtgcctatttcggtgttttttcgccttgtcttttgcgggtccacggagaactgcaggtggaccgtgtgtgatcgtgtgtgacgaggacaccaaagcgtttcgccgggtttgtgatggggtgtttgggagggaaagttgggttggggttggtctagagggctggagatgcccaattcgcccagccacgacgtcctcagatgttgagtatacagagcagggcctggaggtgaataaaataaataaagtaattgaagaaccaaggaaccaaagacgatcccgaacggattccagggttccgtttgtttacaacgtccctatcttcgtcggtcacgggtacacaggtagcggtcgggtactctttgtatggtggcccacgcggctcggaacctgcgatgtacaatcgccaacacatccagcctcttcatttttcgtttttttttttctatgaggctgggcatcttaattactcgggtaccggctgatattcgcctgacttatcctttgcttcatctttcattcctagcgattctgaattcctttccccttttcctctctcgcattttcatgtgagggatcggcgagcttcgacagcaacacttcttgggcaccctcaccgttgcttcctctctctccttcctaattctccccattcttaattcttccccactgttccgtggtctgcgctggtacgctctcaactcctatcaaaataattctcgggttctcttcttgggttcctgtaatttgtccttccccactatcgtgccaacaagcacggagcaacagtgatcaccctgacaacactcccctccatcaccctcggtcgagcacgacggagcatgcgattgggttgaaggacgcctcaccaccatgggggtcaacacccgcaaaccgatccttcccgcccccacagaatccatcatcgataccacgggggacagcgcaacaggcacagatctggcaactgacctttctcgccgcacagacaaaacgtcgtactccatcccagacgacggtagccccgtcactgtctccactcggcggcagcgggaacgcgaggaaaaattgtctcgagctcaacaggactctcacacctcattactcatcgagtatttcgagggcggcaaaggttcaagcggcattgtctctcgtcctagtgtgcgagtgcgtgtgaccccatcgtcagctagaaagtccagagataagaaagaccactttcaaatcaccgaatcaagccgaagccacagccgcaaaccgtcatatacccaccggatatccctaccatcagcatccgcaaagcagaagcaattggaatcggaagcggatgaccagagctttagttcgaattcagccgaggaagaggctcattattcgtcacgtcgcgatccggtagatatcgaaattgtgaaccgcggacagggtagcgagatgtcttccatctcgcaagataatcgatacatgaccaacgcctcagaggtttcgtccatgccaccggacagcatgatcaacgcgtcgtcggctggtcccaggcggaaacgcagccagagtatggagcgtgatgccgacgaagataagggattgctcaagacccctcaccgacaaagaagtcgcagtttaagtcatgagcgaattgcgcatcgcgtggcagaaaagctcaccgagtcaccgcaagaggcttcgagcggcagacacagaagcaagggcggcaaggattacctcgaagccgaaacaaaaccatcccgtcgccgaacgcgcaagtatgcggaagaggatgtcaccagtcctgactctagtattctcagcacatcgggagtctcttcaaaccgcaagtccgatcagtactcagttcgctccggtgcatccaaatcctctatcaacaatccaaagttactcgagacggttgaagatgcgatcagaagattaattctaccggagctaaaggaactcaagaaggaccaaaaagtaatgaccaacaagaacaaattcgatcgggacgtggctacatctcattcgtctggcacgagctccagagatgagctaggtcgacgtctctccaagcacgccagtgcgccggatgttatgccccaagttgttctgaacaagaatagcaaagacgaaggcattgttctttctcccgaggcggccccacgcagtaaagaggtcaaggaagtgaaggaggtcaaggagcgtaaaccaagcaaaagcagcgaaagctccgaactggcgatgagatgggccaatcgacccgacttcaccgaacaagacaagatccgcaggcagaagagcaagggtctccgcgacgcccatgctgctgcccgagttgggtctgctcttacggcagcttctttgaaacaccacgattcgaactctagtctcggcagaaatgatcgccgccgagatagtggctctcggaaaagttcacgcaagagtaccgagagtatgaactataacgaaaccgagcttgttttccagaagcacaatgttgcgccaatgccaatgcgcagcgagatggactccgagttgaccagaaactcgctactctcggagcgaacggcaagtcccactcccgaaaaacaaacctcttatttcgacactactcgcggatcgccgaggcaggccatgtcgccagcttctcgcactcctactagaaattctgccgactcgcgttatgggctcggaatgcgccatggcaatcagtcgcaacataatatttcggtgcacagtgcttcggagcgcgaccttcatcaccagagccaatcccctggaaccgatggtggtaaccgggcaattgcagctgcagccgcagctaatctccttgatgctgctcaccccggacatcatgaaacggaagatgactatcacaatgggaccaacagccgcggactgagccccattcagagtcttgcaagtgatcatactggaattcgccacgatcattactcgactcacagtgatcagcatgtcgacggcaaacatgagatggagcctcgactctccatagactctctgtcatccgcccccagtacaaacctcgcgagatccactcgtcagggcactagctcacacagccagagtgcaatctttaagcagcacagccaggaatcacctgggctcggatacgaacattcgcgccagggctcccaagacgatggcttctatggctatgacgaggagagcagacgctctcacgacgatggggatagcgatgttgacttcatggagaaagtcaaagaaggccaccgtgtgactaccggtgctgctgccaatccccaatttatgcacccgatgcccgtcgaatctgcagtcgcttccttgatggatccatctgtccttgattctcatgtctcatcgaaccgctcgcaaacagatctaagtcaacgaccaggcaaccgaagccctgaaaagccaggaagcgaagtttatcgcggaagtcctttgaagcaacgccaggatgctttcactgccgatgagacctcgttcccccgacgcatgggtgccacatcgccccctcagagcgttacccagtctttggacgatatcgacgactctgctatgatggatgccaatgtcccacatgaaaagcaaagtcctcacacggatgctgaaagccaagtctcagagtctgaaatcaacaccaacccgtccattatacagggccccattggtggtgtcgctcaggcagaaaactggggatatgattcaagatctccgccaccggatcactactacgatacccagatcggcggatctaagggtctcaatgccgagcagcagataggacttgatgcggaatactaccagactgcccagaatatctttggcggtgatgactactctgcccactctggcgacaaccaggcccggcaatcgtttggtacccctcctggtgccaaggacgaaggctacgtttcggctgccaaccctatgtctcctagcatcgggaccccgaagcaagctagtcgaggtcttgccggcgcggatgccgctggaatgggtagtttcgatagttctgccggggcagacgatccttttgcctctggtaatgagcgccacttcagtggctactctcacggtgttggctccccactctacgacagtgctaccggccgaggcattgagagaattcagtcccaggacattgtggctcttatggatcatttgactgttcgagacgcccagcggaatgccagagataccgagattctgattactttggtccgaagtgctgctgagatgcgcacttcctttgagcagatgaggagattcatcgccgaccaagatgatctcatcatggacgtgagtgacaggggacatgagcggactcacagggcgcttggtggtccgcgaccattaccccccagtggttctcggactcggcagctgaacgctgaagaggaagataagcggaagaacatcttcaagcgtgcgctcaagggattgagtctcaagtcgggcagtgatttgaccaagattgagggcatgctcgagcacctgcttgacgaggttgaggccctgcgatccggacaagatggcctaagccctcacggtggtaccagaatgggaagcatagagccaaatgggtacgagactcctggtccgaatggtgtacctactgagacgagccgctcgccctacgggtccggctcttctcgtccagccaatgcgcagcgcagaaattcggaccagcgagtcagcaccgtccatgaagttgacgaagaccttgagcttgacgagggtgaccagtttctgacttcacatctccctgtccgcgatgcgccccatcatgagcggtcgggttcattgccgcttgacacgcccccacgcaagccagtaaccacgtcagctcgtagcaccgagacaacccccaaggctcgcaagcacaagtccagcagctcgtccattttcccgaagatctcgcgctggtctaagtccacggcgacctccatgggcgacggtattcgcaacagcatccagccttcccgcaaagagcgtccgacctcggatgagtctcggtctggatctgatctcgcaccccagggagcgtatcatgatccccaaggggatgacagaatccgatccaattataccttgaacgaagagcaagatgagaacagacctccttcaccgctagtgccttcccaggtgtctgaggcgcccaaataccgcggccaccgtggaagtctcgagctgcagcacccccagcctcggcaaggcccaaccgcccgttaccagtcccgcctcgaaaccgaggcccaggtctacggaggcccggtttctcccactggctcagaacagtgggattccaaccccagcctggtcaacccttcccagaaccgcaacagcggtgccgcgcgcctgtccccgatctccgacgcaggctactcggagaccagctcccaagcaacccgtacaccaggtccaccccgtcctcctaaaatcctcgattcgggtcctctcattcccgagcgtcaacccaaagcgacggataacgaggaaccagcttacagcggtgaccgtgttgtttctagagtatgtattcccaaggatccccgctaccgtttcagttgaacaagttctaatctccactcttcagagctctgccgtctgctcaccccccactcgcaagccaactggcccgcgtccccttgcatctgccggctcctacagcccaggcaatatcaagcgaacccgctaccgaggcagtcccgtgcaaatcgactatgacgatgagtagtattgagacttgcattgtgatacccctgggttgatgttttcaatctccatttccatctagcgcttttgccttttcttcttgctctttccttacgacagttatgaccgttccctgggactccggtttcagttccgttaaccctaaatctatgagcaatgtgtgtgcatgtttaaatgtctacaatatttcctgcctttatgttttatgtcaatggccatgagatgagcgggaagttatgtcttctcttcgcctctctgactttttccactctaagtttctctgcttatttttcatgctcttgcttccggcatgcagctactctcgcgcgtctactaagcgtgaagcctattctttgtagcttttgtgttgtggtgtagatagtggtgcagaagaagacagaatatattacaagttcgaggtgtggaattatctttcggttcttttgtacctttctgttgatgccaagggatatgaatgccaaaggttggttctgtatatgctcgctagtgtagtttcgagcgattctcttctaataatcaattcgtaatttgcatctcttcttcgtcttggaggatgtctctggcgtatctccttacgcattatgcataagccaaattgaggtctggtcacgggccgtgccggtgtgtagatcaaggggccaccttccgtcactcatctatcgttatctcgacattcccatccatatttcgacataaatccaacgctctataagaaaaactggcgttatctcagagatgctctcgtcttttcttaagtccttgccccggctcggaagaagatggacacctctcaacttcaccaatcagaatttcactcggataccaacgagccatgcaatcgaggaggaaactatcccaggctatgttgctggtcggtattatcctactcgaatgggggaaatactcaaggaccgataccaagttgtggggaagctggggtttggagtcagctcaaccgtgtggctcgcacgtgatatagagtaagacgacgatacctttacaactccttcactcactgaaaatatagctatcgtcgctatgtcactcttaagattttcataaagtccacaacgatgggccagcaattggatgacgagctgaagatatacaaacgtatcgaaagcgctccccggaatcacgcaggtcgcaagtatgttagatctctgctggactcctttgatatcagtggacctgaagacaaacatcgatgtctcgtgcatcccccgttgtgggagagtatgttggatttcctgttccgcaacccggtgcagagactaccaacaccgatcttggcagtgacgcttcatcgtctatttcttgcattagactatttgcatacagaatgcaagatcatccatactggtgcaattttctttccccagtcttgagatcgatcatttgcttatcaatatatcagatatcaaagcagataacattatgttcggcattgctgatgattccgttttcagagattttgaaaacgatgagcttcaagatccttgtcctaggaaggagttagatggaaggacaatctatacctccagcgtgcttagaacgcctaaagacgtaggcgcgcctgtcctctgcgatttcggctcggctgtgatgggcgacgaacagcacaccgaagacattcagccggatatatatcgagcaccggaagtgatcttgcaagttccatggtcatatagtgtcgatgtatggaacgtgggatgtgtggtaagaaagcctatacttctgatgcaaaaaaagtgaagttttaggcttacgttgtcagatttggaaccttttcgaagggggatcgctgtttagcggccaggacccagagttcaagacttataggagtcgagctcatcttgccgaaatgatacgcctgctcggtccgccaccgccaaacttccttgcccgggggaatcacacgaaaaagttcttttcagaggaaggtaattcatctatctgtcattttcctacctatgactagaaagtgtcaattattgactgtttctgctattctaggtgactttctcattggaaaattagtaggagaacacgtaccaatcgagcaaagggagactagtctcgagggagaggaaaaagagatgtttcttcgcctagtgcggaaaatgctacaatgggagcccgaaaagcgaagctctgccgcggaactcgaacaggacgagtgggtgcaaacagaattacgtaaataactgcatgtccttcagagtgtactataagaaccacacagagtgcgaagcgcatgcgaatacaccgatatccccactcctgctcatacatggagaagtctcccctttaagccgtgacgcgtctaggcagtcttttagggcattagcggacctgcagcggcgatccatctgcattattacgacaattccgacatccgattccgaacaacgatttcccttgaataaaaatagagaatgagcggtttgagttccaaggattttgttcggcgtctcggtatctcggggctcggagtgggtccgccatccgaagtatgcagtatcccgagaaatctcatggatcggcttgtgtcactcaaatttgatgtgtggcgatccgaagctgccgccgtgaagactcctaaaggaatatttaagctggataaattgccaagggctgccctggttcaactgcacttatcacatacacaatctccatccacgaagacatattcacaatggccagcattgaacctcacctctgcttccggtcatttgtcgaagccttgaaggccgacaatgatctggttgagatcgacactccaatcgaccccaacctcgaagcagccgctatcactcgtcttgtctgtgaaacgaacgacaaggccccgctcttcaacaacataattggtactgagaagggtcttttccgcatcctaggtgcccctgcatctctgagaaattcctcaaaggatcgctatggtcgacttgcacgacacttggccttgccaccgaccgcatctatgcgcgacatcctcgacaagatgctctcggctggcaccccgatcccacccaacatcgtgtctaccggtccttgcaaagagaacttcctcgaagaaagccagattgatctgaccaagctgcctgcgcctctgattcaccaggctgatggaggaaagtacatccagacgtacggaatgcacattgttcagtcccccgatggatcctggactaactggtctattgcccgtgctatggtctccgacgataagcacctgaccggtttagtcattgagcctcagcacctctggcagatccaccagatgtggaagaaggaaggccgcgacgccccttgggctctggcatttggtgttccccctgccgccatcatggcctcgagcatgcccatcccggatggtgtgtccgaggcgggatatgtcggctccatgactggatccgccttggatctggtaaagtgcgatactaacgatctctacgtgcctgccacctctgagattgtcttcgagggtaccctttctatcacggacaagggtcccgagggtccttttggtgagatgcacggctatgtcttccctggagatgtccacctgtgtcccaagtacaaggtcaaccgcattacctaccgcaacgatcccattatgcccatgtcatcttgcggtcgactgaccgatgagactgtaagccatccatctccatatttccggatccctactaatagtattagcataccatgatcggatcactggccgctgccgtgatccgcaagatctgccaacaagccggtctccccgtaaacgacgccttcgcgccgttcgagtcccaagtgacctgggtcgccctgagaatcgacaccgcaaagctgcgggaaatgaagacgaccccgaaagaattctccaagaaggtcggcgacctgatctttaactccaaggccggatacactatccaccggctggtgctttgtggcgatgacattgatgtctataatggcaaggacgtgatgtgggctttctcgactcgctgccgtcctaacctcgatgagatcttcttcgaggatgtgcccgggttccctcttattccatacatgtcccatggaaacggatcgccagtgaagggtggaaaggttgtttctgatgctcttctcccctgtgagtatactaccgggaaaaattgggaggccgccgattttgagagctcgtatcctgaggcggtcaagcagaaggttttggccaactggacgaagatgggattccgggaggagtaaatcaaatgtatatagtactttgttacctcaaatgtagattggaattttgataaatacagtatataaacttttttggtaattcgggtatatccccggggccatggatacttgccaagcaaccatggccggccccgtaccggtgtaagcccccgtgtaacccgaagtgggcagttctgtcaaggcggaaacccaacccgacctgcgtttcgccctacatggctcagtttagcccatatcaccctataccaagctcggatgcgtgttattgtattgaaagagtcacaacctttcaaacgacacaccttcttggccaatacaacaacccctgataatcccggtacctcggagtcctcggcagcatgagcgccgtcagtcaaagcgaagcagaccgggtgctacacctcaagagccgagagcgagaggctcatgcatgctacacatgcagaaagcggaaagtcaaatgcgatggaaaccaaccatgtcgtacttgtcagaagcgaaaacaccccgaaatctgcacctacgcccttgcacattcgaggcgcagatcggcttctcgccacagtgtcgctcgctcggcttcgcccagatcaccggccgtagcaagcaacgaacaagcacggcctgatgatagttcgaaaaattatgtctattctggtgacaattcggttgtttcgatcctgcgcatgcgagcatcggacgtcaatggatcggtggcccgcgatgttggatctgttcttggtctgcagaataccttcagcaattatatttttatggattcgaagacgccgcttgagaggtggaagtcactgctgactgtaatgcctcagagatcagaggtcttgaagtaagttgcaaacaactaaaaaggaatacggctgactggttagattctttcacttttatcgtgtcacagcatatccattcaatccaatactcgctgacatagaccgctttgaatctgatttatgcacctatctcaatgctcacgcatctggtgaagtacgcgacccggaaaagatcactgatcgctgggcaaccgacaagtctattggccatatcagccttctactagcaacattggcggcaggggcgcattactccgatactgaataccccgaacgctttgaactgtcaactgactttggtaagcttcatcgcacgctcatcaagcttggctaacggtatccagcccgtcgatcatttcatgctctccgcttggccaatttccttttccgaccatcactagatattatacaagcgctgcttatcttggggaatacgctgcagaatatgggacagtccgacgccgcctgggcgttactgggaacgacgatccgattagctcagactatgggcctacacactgaaaggagtactgttcactggccggaaaatgtgagaacgaaggccaggaatctttggtatggaaatcagactatatgcatacctactcgacaactaacttcccacaggtcaacaattgtctggcaggatagtttactgtgcctttgctatgaccgaccgcctattgtctccgtgactggctggtctcccgttaactcgtttttcgagagacaagacttgtccttcgcagaagtgatgtactttatctgtcgtattggtctagatactatgcgaccggaaagcctcagcgtcgctgaatatgaactagcaatagaagggttgcgtcagctagattatgctcatcaacgcggtctaccacatcttcgatcacgggaaaattgcacaacactacaacaacatctcgagcatttagctcttagaatgcacacctccttttgtgtatcggttctctgccgaccggccatgaagcagtccaccccacagccttttctccaccacgctgatattcttcgggcgcgtgccaaaggaagcttgatcgatgcttccagggcatttcttgattttcaagctctaagtactgttccattgcggacctggtcaatggtgcatacagtgttgagttcgaccctgcttctctgcatctgggaagagacgcgcaatgaccccgaatgtcgcaatcttcaacagaaagtcatcgacgtcttctcatcgtctaattcaggaactaatgacgatggtgcttcttcatctgaaagtgatagtcagtggttatcggctcgtcacatccgagccttggtgactttacgaagcgccttggatcgagagcaggaaacgggcgctaccgaaacagagaactgggcagaaatgacctcgaatatggtgccgcaatttggtcctgggtaagtttcctgtccgtagtgaagatggatgctcacatctgaacaggcccatggacatgcccaacccattcgatgtatcacctgtcacatatttggactcgatcatgaaccgtaagcacggtttgcctggtttctattaacaaaagctgacatctcacagttccggtctttgattatacacaggaaaatggatttctgtgagaaccttaaagccgataccctgcgtgcggtcatgagggccagacctagatcaattacgttttcacaaagcataggcacatacagtaattacccatccaggctttcttgcagatcttcccatcgatctttccctaaataagtggcgccactgtgtaatggccctccgcaaaatcatcggctctcggcctcggggcctcggacgactcaattcggagtctctaaaatctcaatgacatattctcctgtttttcgggccatgcgataacttctagtaagaaaccccgcgcaacatgaatattcggcatcttgccgtagattaatataaaacaagccagggttgctaggctcagttcattcatcacacctatcttcacagctccacgcatcactcaacaagaccgaaataacaccttcaacaaacctcaaaccaatgctttctcttctctctggaacccaaaccccatcttccagtcgccattcccccggagacagtccaactgaaacagccatgccagccatcgatcaagcccctcaacaaacccgacgcagacgcatcgtggtcgcaatgaccggcgcaacgggcgcaattctcggaatcaaagcgctcattgccctgcgtcgtctaaacgtggaaacccacctggtcatgagcaaatgggccgaagcgaccatcaaatacgaaaccgactaccacccctcgaacgtcaaagcactagcagatcacgtccacaatatcaatgacatggcagcgccgatctctagcggatccttcaaaaccgatggcatgatcgttgctccatgtagtatgaagacactggctgctattcacagtggtttctgtgatgatttgatctcgcgcactgcggatgtcatgttgaaagagagacggaaacttgtcctcgttgcgagggaaacaccgcttagcgatattcacctgcgtaatatgctggaggtttcccgtgctggtgcgatcatcttcccgccggtgccggcgtactatatccggcctgcgtcggtggacgacttggttgatcagagtgtggggcgcatgctggatctgtttgatttggagacaggggactttgagagatgggaaggatggcagactcagaaatgaaggccagagctgggttggttcgttttgtcttgcatttattggcgttgatatagactggtgtactcgaaaatttacagtgcttttcatcgacgtcagctttctattcccctcattagatcgatatcgagttcagggtaagtcctgaaactggtgaatacagccgatatcctgaattacttcctggtatgtcccatagtagtcacgcggaaagttactaatttccaaaacccggcattactctacccgccctgtatccggtggttccttccagatcaacgaggataataattgggaaggcgaagaataccaaaaaggaaggagctactccgtagacacccccaaagtcggctctttcctcgggaactcggagacttcggaggccttggaaccttagaaccttataattgttcccgcggctccacttgcctaacccttcttcaacctcctttctctctattgatgtctagtatcaggcacactgctcgttccatcatgtctgctattgcctgcaaacatcttcgtccgcgaaagttcgcacctctcggtgtggagacgtcatctatccctctcctgaagggaattgtgtttgatgtggatgggaccttgtggtgagtcattctttattctttctcttcctaatactctatatatgtgctgtagttatttcccttgttgtatgtttgctatttgcgtgcaccctcgagagctggtatctacatcttgagctattatttggaagtggccggcctgggggcaagaaatgaggattgaggcatcaatttgagattcaggcagaaacgatttcctattcaggaaaatatacctgcttgcgcaggttagatgataagccggtctgggacgtagtagttgagtggaggcgttccctttctcttcgggctttatatcgtattccatctttttcgtcttgttgttttctatttggtattggggcgattctcatgataccaagctctgatcgtgttatcaacaacagtatattgaccgaacctcgctaaccttgaccagcttaccacaaaactatatgttccgtcagatgaggtatgctctactgcctgcgagccattcaaacccctctgtaacaaatattccactatagagaagcactaggaatcgacagctccgtcgatatcctccaccacatccgccaactccccaccgaagaacaacccacagccgtatcgaaggtgcaagcagtagagcgccgagccatggccgaccagcagccgcagcccggcctggttctcctaatggactaccttgaatcccgcggcgtacgacgagcgctctgcacacggaacttcgagtacgttgtagttatcaacgcaaccttccacatgcattctagatacgtactgtaatgtgcacacaacgctaacctatattcgcatctttagagcaccagtccagaacctgattgacaatcatctcaacggtcatgtcttcctaccaatcatcacgcgggacacgccaaatctcctgcccaagcctgatcccgccggcattctgcatattgcgagtgaatggggtcttgatgatggtcggaatttgatcatggttggtgatagcattgatgatatgacggctgggcatatggctggcgctgcgacggtgttgcttttgaatgagcataatgtgcatttgaaggaacatccgcatacggatctttgcattaagcagctatctgatttgatcgatgttctggaggcaggatttgtcgggactagagagaacgatgagcatggcgcgtgatgggatctaggtggaggctgccggatggatattgggcagcatgggtatgtagtgcgtacaatataagaaatatacttgctcaagcgagagattttgaataaactgtcatttaatcgtacatacttgctcagctgagactgagcggaatggtagatgctgttgctggctttcgccgagatctgtcgctcaattctgaaggggtaaaacctccttcttaccacccgcggcttcggccgccgccaccaccaccattacgtggtccgcgtgagaatcctcctcgttgtgatccgcggtttcggccgccgcctctcggtggaggaggaccccgtggaagaggcgggttgggggagcgcgcgcgattgttgtttccagagaatgttgggcgaccacgagaaggccctctagatggtggatcaccaccgcgtttagctctgcttgggaccctgatggaaagagtattgccacgaggagcagggatggggcgtcctcggccgccgcgggatatgcgggacatcatgtcatcatcgtctggggatgggggtcgcgaccattctctgtctcgtccgcgagatcggcttggtgggccggtctctcgctgcgggaggacggtgttgaggtttgtgatcatatctgggtcgattcccttcaaggtaaatgatgatgacgcggctgttgcgcgtaagctgctagatgggcaatctcctacaagatgcttcgcactgcagcaattcgcacagcagattgacactatgacttggtcggagtgaagatccctccttgggaacttccataggaaatcacattcggcttccaggtgttcattgccgcagtagtcacatggcacttcgtaagcgaagttccgtagctttgcatcgcattgcggttcgtcgtgaccacgttcacggcatctttggcatcgtcgccaatcgggacaagtactgctttggtgctgattccaggcaccgcagtgttcacacttcatatttgaggttagtaatgtgaaaataaataactagatgcaagacagaacatacctcttttgctgggcagacatcggctatatggccctcattttgacattcgagacaagagatgggaagtttgaggtctagatcatggatgttacgatcaaaatagacgtacttcgcaaggatctcaaggtctgtctggcttagatccactaaagcaacaggcgcatttggatatttgattgagaaaagtcggaacgcttcctctttcgacccaggtccggattgtgtagatgtgcctgagtttccggtgttggacccatgctgatgggctagagtggcagggtcatagtcattgataccatccatcttgtcccctatgttcagcaggatagagtcatcagcttcagaaccaagagaatctgaatcatccgtgtcactcttggagtcaatttccccatcttccagctcaccgtcgtcttgaggttggttgtttgctgtgggcttgtcttcgccattggccgaaagagattcactgcgactgcgccaatatttatcattcacggcttcaaactgagtgggcttctcatcgggtggtgctggtcgttttccaagtgttgtgtgtactagagcggggttctcgtcggctggtgctgatcgttttccaagtgttgtgcgcactggagccttccgaccttggttccagctaattgcaggcgcggtgctaccggcatgtgggtttgcgacggtagttggggccgcattagaatcggaggctgaactagatccagagctagatgtgttgtctggatcatccactggcagtgaggtggcactgaatgcaacaccttttggaacaaagtcagctaggtccgagtccttatttctattgcggcgccgtctcttggtcgggcgggtgctgtcgcgggatgcggagcgcgaggaacgcggattggaccgagtgcgcggtgcgcccaccagggctgtgcgtgaatcagcctcttcatctgatggatttgccatttggttaatttaattggataatctggataaaaatatcgggagatagagtgagatagagtgagagagagtctggaaggatcaacagtagaatttgggtcccagagaatttcacggcagacgatatagaccactcgcgcaattccacaattggagtttacgacttcgggagatatatgaggcgataagttgtagaacccttggtttgcactccgataaggtttataaccttctttctgtagtatataggaaggaaactattggttgcttttgttttttgagaacagtatctcccaataaatcattacagagagcactagcagacctcgtctcggttgtatacaaccgagacacaaaagaaatcagataatacaagatagataactctaagatcaagtcaacaggtcaattgatcaatgtcaatatgatctagacatgatctagacggcaggcaggccactagccagtaaacccttttgaccggggttgcactcgtgacttcaacatcatatttagattcattcgggtattaatgatacagattatgagccaacacgccacctccaagggcgagtcattaaagctgcagtctgcgtaggatctacccgtaggaggcgatcgacgccaagagtggggttgatgtcatattcgtagtcccaaccgaatgttattatggatcttatggatcttatggatatccatcttaacccctcgttatggtttatggattgggctgatactgttgagtatctatgaactacagctaggtgaatgttcatagcccgcactcatccgcactcccatttgccagattaacgagttgattctaaactgacctggcagtgttggagaactacctagccagcaccagctcttactggataaaccaaagacccatctactcttatttgccggtgacataaaacgctacatataagcacggcaataccaaataatttgggcggaatccgagccagtgttcccgcgatcaactacctcggtttataacaaccgagtatcgggctcgtcatgtaggatgaaggcctctttccatgtcgataagatttgtggagctctacgacagcaccttcagaaacaagaacccggtacatgatttttgtattcaacaatgcagacctctcccatttcatagccattgagaagatgaccacctgccgtggcctagtggactaaatactatgtatcaacaatctttatcaactgttcatgacacctgttcagcattttgcccccggggataacacctcaatacgaagggaaagccggtggcttagcctgaagaagaccgtgccctaaacacggcagaatattgcatgctgccttttcactagaggtctcgaactcattgctattatgcaaacacataaggcccttggctttgaatgtatgattgcacaagaatagcttatgcatctgctaagaatctactatttggccaggtaacattagagattttatataagaacataccgacatattctatatgtatttctaggtctttcaatgtcttctgagatggcaaacgtggcaataagcataattaatttggcatagttgagtaaaggtggccaagtccatatttttagtcttttctatatgcatctatcgaagtctcaagccatattgccccataaaaggaaacgtcaacgataagaaacgtttcagatcttcataaaaccagaccaaaaagacaggatatatataggaaccttcccctttcctgaatccttgatataaagtacaatatagttttactcctttcgggctagattccgcacatgcatacgttttgtacatgggccaattatgcattttgcctctagttgctaggccaatcctgaaagtaggaaatagattagggagaaaaaagacccaatctaattatagacctctgatagaaaagcgagaaggaaaaaaaagatagtcccagcaagaaaaacgagaaaatacgtgaatcagagagctcttccgcaccccgtgaccgaaagccgatccgaccggcaaactcccagtctgggccgtgccacctcatccccacgctccttttcattcttctctccttctcttccaacttattcttttccttttggatccaaccgtcaagctggcgtccgacaattcaaaagtgtcttccctgttgaccccccgggggatatcctttcctccggatgttgacacagggccgcagcggttgtctccaaggatgacctcaaaacaaggccgccggaggcggtccagcagtcttatctaccaggaaccggccgaatctattgagcacactagtgatcaagccgcattgccaaacctgaatgcgaactgggtgaattccaagggtgagtgaccaaaaaaagccgatcctggagaccacatatcacaagatagagaagaaaacaaggactaacgtggaatcttatttcaattacaggtgcttggaccattcatttcgtgtgtatcgccgctctcaagatcttctacgacatcatccccggcgtctcgcaggaaacttcatggaccctcaccaatatcagctacatgttcggatctttcctcatgttccactgggtgcggggcatcccatttgaattcaacgccggtgcctatgacaatctcaacatgtgggagcagatcgacaacggcgatcagtatacgcccgctaagaagttcttgctctgcgtgcctatcgtgctcttcctcctcagcactcattacacccatttcgatttgacccacttcactatcaacttcctggccacattgggggtggtcattcctaagctgcctttcgtatgttatatctgctcgggagaagacttacgaatctcatttgctaacattctgattagtcgcatcggctgcgaataggtctcttctccgatatacccgaggagtcatagtggctcccatttaatctttccttttttttctcaccgataactacccatgttggcgtatccacggcctccttgatttcccgagctttctcgccttcccctccttttctccataaaaggcctttgcattgcgaatttgattgacgggggttgaaccgttcttggccaccgcgcatcctgtttctctttctttcgtgtcggcaaatatgaagagcagaagtcactgcgaatcagtctaaattcccatcctttcggtctgccctaggcagcttatccttgtctagatgttcaagtatccaagccctgcatattttaccctgcaagcatctattctctcgggtccctgctctgcctttgaaatgttgggcctgcgtaatgtaagggatcaacgtacctttgcaatttatgcacataaagtaagacattgtccctagagtaattaatgcatgtcaatctcttggctgtggcccatgcggggaggggctattgtctcattgtgtctagatataatccgatcaggatatcacttctagcaacattcgaatgattatgttcgaaggatacagacaaagagccaaaacaggcaaggatatcgtactgactacgtatataaagcccgtgagagaaattttctttcatctgccttttctaatattctttgtcttaatcctcaacgaaacctcaaaactcgaagagaatgtccatggttttgttcatgtcgagttttagccttgcatctgtttcggcgttcattcgttccttttatttactttttgacgagaatctttgaatttaaagaggcatataatatagtaaggcatgaagagaacatgaaaatacggtcctaatatcatattgacaatagatcagattaccaaagtcttacgcttatttgctttttttgtttaaaggaaccagaggaaggttccttccctattaccacccaagtacctatagcttcctcgattgtagatagcagtcttaacttcctacacggcttggtctaattctcaataaactagctatatcttcaccagctgagtcgtcagtgtttctctccactatggatcaaaaacctttgacagctttccccatatccttcctgaagacaatacatctcatcggttctctctcctggctgcaagtgctctacgcagtctcctacatcgtacgcccgttttggaacacacggcgcgagtttccaccattcaacagagccatcgatcgcacagaaaaaagcattatcaacaccatactcggcactattgcactctcagcccatagttctgaaatagaaacagagcgccagtggtacctttcatcgggaaatggcaccctgaacaacatgcgcaccacctcccaatccatccccagcttgctagtcacctcaccatggccaccggatgaacatcaagactcggattcctcattagagcaagaaagtcccacctcacagccgagcaccgaatctccccgagaaaacttccctatctatgaaaccgtgcgcaagctccgatctagcacacggggcagcatttcaaagctcgccaactcggcaaaatccatcttccgacagcctctgaccgttctgccacggaatatgggcgtcccctccccggatgaggaacgggccgagcgagacctgattccagtcccagtacacactgcgcagcctcacttcgtccagaacatggctttccccgcgcccatgtcggcctctgcacatatcacggatcactttagtgaccctggtccgtcgactggaagcaaggtgcaacagccagtctcgtttggggcgaccattgatgcggcagctgattctgatacggtgcagatgaatcgagcgcgcaagtatcaatctgtcgagagctatccgggaaagttccctgttagtgatacattggattatagctcgcttgctagcgcttatgctgttagagggagggggactacctccgttcgacctttctcggactactagggctttttttttggtgatgggcattctcattggcattgcgggtttcggagatgatatctccgtgacgattttggctgtttgactgaaggcttcgaattaggtcttttgatttgctttttaggacatgacatcagagtcagtcctgtacttgggtttctgctattcattatattcattaccaaagatcaggtctgtcaatcttgtcattcaatggaatttctatattttcgcagaattggctagttaccttcttttatagttaggtgagggtcgaaggatctgcttaatctggcgctttgcgattcaaactttcaccaaaacaaacaactcggtactgtaagtacgccgtccacggggactcatgcagtagccctgtcaattcctcgtcaatccaaggaagaaattgtcagttctttcattgtctgtatacttcccaccgcctttgtttccgctcgaaacaaagaagttcaatctttttatagaattagttgtcaacatttctcttagctactagccaatataaaggatagtatgtatttatcctaaatacctctagaacctactttggagtcctttctcttgcataatgtcacatatatcaacatccaactgcctcctgttctgccggacatatacacgtggacctctttcgacgcggacgcgccatccttatcgataagcgcgttactgccactatcttttcagctggcttttcaaaaaaaatcccccctctggccatggcaaccatggacgaggtaccataccggccacatgtgccccttcaatgggagctggctcgacagacagaaatcttcctcgaagatagcctatgtatgttcgcttttcccgtgttttgacgcgtgcgcaaaaaaacctcaaagagtcgctgctaatgatctccttctcaaccagggccgcaagcatatagccttctctttaatgtccttgcatcgggcactatcgcatcaacaaaagcagtgattccactgcctcggcatctggccgtcgcagctacgatgctggtgcacccaagaacaacaacgcgcgccgagacggagtacgaaaaggaagcatccaaagcagctttgcgatttctccgattgacgaattctcttgttggtcccacggatgcaaaatttaatctcgctttcggattcaaccagtttgcatctttgcgacctggtaggcggcgtgcggaaagcccgatgctcgctgagaatgacaatcctgataccaggcctctgaatacgaaattcgaccaggcttcttcggtgtggaactgcgcagaggacttctggcacgctgtcggttgggcatttaattgttcggtgcttcatccggcccggtgggagcgctggcagatatggctccagttcatgtgcaacgtactagaagatgattggaaagagtgcgaaaacaaggcggtacctgatgaccttagcatatttcgggaaagcctgatcttccgttatatctcctcaaactccacagctggacggaaccgcagaatcatgcgggcaatctttaccaatgccaaatcgaatcctggcgagttcaaggaggtattcaaagatgaattaagaatgcccgtccctaaacaagactcgcataatttaaagaagagagcaggtgatatcgacctcgacaagggtcactatggcgattaccagaacaatttcgacgatgatttcgaagctgatcaaagctcaacctcggtattagaatcgactgctaagccacgacgtagcaaacgaacccgacgaggaatgcgcaacgcagaggacgacgccacaaaccccattaagatggccaaagcaagccaatcatcctcccgcgaaagcaacaatctctccctactaggcggctacacttccatcggcctccgccaacaactcctcagcatcctctccaacgtttcggaaaaactgccgcgggacttcatgcccctagacgacctctacaacatgttcgtcgagaacattcgcgacctttcgctcccgatcttccaacacttcatcagcccctccaacccacacctcctacccgaagcgcactccacactctgcgaactcctcctcttcgtcatccgcgaaagctccgccccaagctctgatgccaagtaccttacccaggacaagctggagaaatgcttcctcccctatgcggcggctaccccaaccgtggagaacaatgccaagatctccattctgctcgaggcgctgatgacacacctgcacgagggaaagatgatctctgtgaccccatcgctgacggaagctgtcaactctgggattgcgcgtcgtgagaaggctagtcttgatcgggactcgcttgaatgggcttacttgaaggaaagtgggtttaggatgaagtttatggtcgagcatatcttaccgtgaagcgtttctgtaggatcggggatgaccggcgttgtggtaatgatgttaatggtggtaatgatacttaatgatcggatctcggggcgtttttcaagcgtttgaaatgccatttgattcttttcgggtttataattgttatgatatatacttagagaaatgcagattcttcctacttactgtgaaaggactatcctacgaatgtgtgatcaactgtgaaacgtatttttaaaatgtgtttaatatagagccttgagtataaattgctatctacaagcacatcgcgtcaaaaataaagaacaaaaaaccaagggcctgaagcgggaatcacacgcagataacacaataatccaccaacgcagaaatatgataataagtcttctgttccaatgatgatatccgcccacagaggcaggaggaaatgagcttagaagccgaagtagaaggagagaatagtaagagaatagaaggggcaaggagtcaaagaaacaagaaccctaggttgaataggtaggttcaaggagctgtcaacccaagtcaacgcttattgcggcggccggggcccaatgatctggcgcctagcaccaccaataccaaggccaagaccgccacggttctggttatcaccacccatatagccatactgatgaacatcccaggtctggcccggtccagagccctgggtgccatcttgggcgccacgctcggccacagccgccacttgtttctggttctccgcccactcttcctgacgcgcgcgttcgcgctccatctctcgttctagaagagacttggatgcccagccgccggccttggtcttctgctgtgcagctacgcggcggctattctcggcgtcgacttcggaggtcgtggtatagtcttggaaccggtgggtagctggcgctggggacgcgggtgctggattcgaggcgaggaagctatccacgcggctttcgtggcctcggttggcgttgtatgctactgggtctgggaggggccggggcgacttgggaaggtccctaggagggagcgtcggggttgtagagaaagacgatggctttggcactgggaggggacgagggactgggggtggtgcttgctcctggatgggttcgtgctcctctgcctcggaagcagcaggcatatcctgcgtgttctgccactccgtccggagaaggcgccgttcttgttcgagagaagagagatcatagctaggcttggcgggcacgggacgacgaggctgaggctgaggctgatcgccagtctttccaggctggacttcctgccgctcagtttcgtactggcgctctcggtcctttgccagctgtagctcgcgctcgagctctttgatgcggcggctttgggccgtttcctcgaccggccttgctacggcatcactaacctgggagttggaagcctggtactggctcaggaactgaccattgaggcggttatcattcaggcttcgtctctgttggcgttccttctcaaaccgggcctcggcttccttttcttccgccatacgtcgctgctcttctgcttcccattggcgcttctcttcgtcccagcgcttcttctctgcttccaccttgagacgttcttgctcccttgtacgggcagtctcttcttcccatcggcgctcctcttctgcctgggcacgagcctcctcttctgcaacctgtcgctggtgagcccgatctgcctcttccttctctgcgttctgttgacggatgcgttcgtcctcttcgcgcctgcgcttctctttctctgcaaggcttggtacagcaggtccgggagtggtaatctgtctgcgagcaccaaatgcaatcccttgattcccttggctagctcccccaatgtagccatactggtgaatgttccaagccggcgtggtaccctgctcatctccctttttggcccaagtactgtatgacccggagggtttcgcagggctgcctgtttgagagggaagggtccccccgacaatgctagaggagcgagcggatcggggtgtatatgctccgttgcttgaagaccccgtcgcatttgggctgattacaccgcgcttactctgcgggccaaccgttcggggaaacttgttgggcgcaagggtattggcccgccgactgaacgctgcgatacactggagaacctgcgccggatcctttgcttcgtatagatcaactgtcagaaagacatcgtgcggggggaggttgagcggtggcagttggcatgcgcgcaagaaatgcgaaatattctccatctgtacaaatggcgctgacaacttcttatacttcacgcctggtgacacagcgaggtttactagtcttgtgattaaggagttagccaggggtctagacccactacttgagaaacacagatacaacttacttgcaaagagcaatgccatctttcaggccttcgagtaagtctggcgatgccagtttctcatgcagcatttcctcaatccagtcgcgcacttccgcggctgcctgcggggtatagcgggataagcgcatattgcgcaagtccttgtccaacgaagtcactgaagccatgatgagtgcggaatactcgatgctcgagtttgttgaagtgtaggtagactgttgttgccacttggtatgtatccctttgccggtgcctgaccggccctaatggtggcggcgattgggtagcagaaggaaggcgttccgtgatacaattggtaatgacaagatgaagagaatatttcaattactagaagcgcagatgtttccagtaaagtcgtagaaatgaaaaaaagaaagagaagaaggtctagggatagagagaagatcgaacgggtggaatgttcgggctgtgtttatcccccgatgacgttccttgacatgccgtgcgcctagatcttttttttcgcctccttctattcttcacgctcaacgatggttaacagcttgtggttcaaatggaagaagcttcgcctgccctggcgaaaatccttcttggtcggtcagtatctgctttttgtttttctcgtgatgtctcagtaccgctaaccgtctctcaggtgaggatctcgctggaaataccttctgggagttcaaggatgtgttgaatgcatctcggttccgacgcattgttcgattcgatcccaaaactcatttgagtgatgttcaagtgacacgtaagtcccgtcggaagatgcaggctcgggcttggaccacattccctattccggggtaaagggaagtgagactattgaatcataactaacatgttgtttcaacacagcgcaatggtaccaatggttgcgacatgtccgagaacaccccccgagcatccaggagcagcaacaagatcttgtccgacaggcgcaaatcaaacaactcgctcgactcgccgatgaacgctgggccagcaaaccctccgtcctcgataagcccaagaatcatcaacaaccaccaacgacccagatcaacgaggcgaatttgaatcagcccgctaacgctgctcccgcacaaacagtaccggcttcaaccacatccgaacccgtaccgaagacacaaaaggtggagaacccatggggcaaggccaacaaaaccaacccaggtgaggagtggcaacctgaagcgtggactcctagttccaagcggtgaagatgatatcggcttattccggtcatctctccacaatgctatataagcttgactttcagagatgtgtgccggatggtagagaaggctgtcgccgtgccctgttggtcaatttacagcagaaacacatttcaaggaacccgggtcatagatggcattgaggctatctcatgctgaagagtctttgaactctacccgcgctcctttttgtgtgaggatagcggctattgtgcactatgttcaaccttacaggtcataacaggtgtggcccgacctgtctcgggggtttcaaaagaatgagagccatgtatattggcacttgtatattatgctattatagttttctattatctagcgttttccactcaatcttaccatccactaaaggtattctcgagccctgcaattatactctatatcctagtaaatctagtggctaggcacagtgttttttttatattttcaattttcctactctaacatataaatcaccccctttttggtttttgtatttttccatgctgcagcgcaagtgtcataaaaagacctcaccccccttttttgtatttttcaattgtcgcacttgttgcagcataggcacatctcaagcttgtaagaaaagcaaggatactgcacccttttttttgtcgttttatgtttttttccgtcgctttcatatcatgagcagtattccagctcaataaaagaagtcattgcgaaaatcatagctcagatgattccaaaaaggaatggagcatagcaggagggtgtcaaagtccagattccggaaagattggttagatcgtaacgtcaacaagaagatagaaaggtcaatggtcgatttagatgtagaccatgctgttctggcatgcgcttgccatggccaaggtagtacctctaaacttatcctcgttctggacttgcatgttgttgtcatggtagtaagccaagagatactttcgagcacgatcgcagaacttatcagccaggaaggcaggagtgctgtaactaatcgagcgagtagcgcgacccatcagataacagatattgtgggtaagttcttgcaacacatcagctggcttgcggtcagtattgaccttggggttggtgaagatctcatcgtggatgacaatgtagtgagccggacgagcggaaccctgaagaggagcctgggcttgtagatagaagtcccagtagataggacgggtaactccgcggtcaacaacacatccgttaatggggttagatgtccgatcttgatccttagcattggtagggtagaagcgcacgttatgacgctttccacagacaatgatggtaatgttgggcatggctccacggtataccgctttagcagcagcttgaaccttggggagttcctctgtaaggaccatggggaactgaccgtcgctgacaccgtcgcggtacacgagaatattctggggtaggttgccgttgttggtcttttgccacaagctcaaccgggtaagcatcatctccttgaggaattcaatgtgctcctgacggcgtgtctgggctcgaacctcaccgggccattgtcccatgttgtgatcggtggatgcaacgatggcagcaacactagggaagatttcggggtctgtgcttgacggatgagtgacatccaagccaacgaccatggtgttcttcgctgcactgataaagcgtgcgtttgccggctgcaggagttgattgcatcctcccatcttgaggttgaccttcatcgcgttgttactcaagtactgctcattggcacctctgaacttctcggatagcatgcagtgcgtaaggacgccagtcttaagatctccggcatacttgacgtaatcgaagattttgccttcagtggtaggaagcagaacaactaggaaggggaattctctcatgagcttcttgaatgcgtccttgatcatatcgcgattttgtctgtcatccgggccgagaaggactgagagatacggcttagaaggcggaggaagcgtcaggccatggtcacgcaatttcctgtagaaagcgtccatctcgatctcgggattcttcaaggcatcctcttttccgcgctttcgaagccaaagacagctccatttgctgatgctggcgccacgggcaaatttggtgccgatcaaattccacgagccgtttcgagggttggtagtcttcttgccgccatagagtagattgggaggattcaaaatccgtgcaggtacagtgatcatctccctgccgggcttgatccccactgtcttggtatgtcctccggagattcccattatgtccaatccctcagtcataatagagtcatagttctgaggaggccgccggcaactgaacttgatcatgttctgtcgttggacagcggacggctctggcttgaagcattgcccggggaggacttcgcaaacctctgcaggaaggtaaaccggacgttcacgggttccaacattcaccaccggcatatccttgctgtatttgagtgtcctgttgtaggctgttatttcctgttagcacaacgcaaaataccgagtgataggcagcaaacatactcttgaagaagtattcggtaatgctcatgtattttcccttcttgtcatctcccatccagaacttcacattgtccgcactagatgagaggttttcaatctgaggagggttggggccagggcgtccatcccgaggagtagcagttccgaggatcgttctgacagggtattccattaccccagctccgttctctcgacgctccagatgcaaggcatagactttcacacccttcaggtaccgattcaaaagctctcggtccgttccgtggacttgggcaaaagcaacaagtagctcagacagcatacccgaacggaagaatgcactatggctgacattcaaattaaggaagattcgtccagcaccaacacggacactcgagtagtaaccacgaacggcttcggcgccagccttcatgtccattgactgcttgcgcctgtccatccggaagaacttgttgcgtcccttgccgacgatggaaatgccggtatctttgtaaggatgagcactcatgaggatattcagtactcggagacagggcgcttcattctcaagttcctctcggtggttgacgttctcaaggcacgccatcatctcagccggggaataagagctgtcgagggtcaaagtggcttcccaggggccggtgtaggctttcgatttcccacctccatgtccgcctccgttgcccatggaacaagtgaatggctctctgccttcggggagtagctcggtagtaacaatctcagtagcgccatcggtggcaacgccaattcctttgttgaatagagggtacttgcggaacatactatcgagaacgaacttttgctgtgctttcttcgcctcgggcttgaccttgagccggtaagagtagaatctaacgttcggcttgaactccatggggaagaagttggcgcgaagcacaatcgcacgaccttgagtgccgtagccaggacgtcgagccaaagagttggactctgggcgaacctttgctgactccgtaacgtacttgtcctccaaggcctggaccctggtgctgggagcttcaattgggtccgacaacattctgtgcgcatgttagatataaatctttcctaatgtagaacaaataaacttacccagagggggcttcggacccgccacgtccaccaccgccgcgaccaccaccacggtcactgccacggccccgatcaccgctgtaaccgcggtcaccaccaccccggcctcgggagccaccacgatcaccaccgccacggccgcctcgaatgggcaaatcgtagccacgaccagacattttgacgagtgtctagttagagaaaagaggtagttgtaaaaaagaaatgattatgtgagaccgtgaactttgcacgtgtctgagaaagtaggataagcgacgaaaaggactcgaaacccctagttatttgggtatttcggagaggaaacgaggacagaaggaaggacggaagagtaggtttcaggaaaggacaagcgtaatcttgtccaccgcaggtttcctttttcagaaaaaaaaaagaaaaaaaggtcaaatgcaggttcgttgctctatcgttatgcattagtaacgatgaaaaattggtttgttgatatgcataaagatattgatgtaaactcagaaccatgcagcagagtaatgggtgatgtagggcatgcaatagcatgaggcaagtcgcccaacccacaaccaagagcgagccaatgggaatggaaatgcagtgacaatggagatagtgaggcaatgaagatgtaggactagatatcggatatgaagaactggatgatggtgcaagggaaaaagttcaagggaagacaaatggaaatcaaggtagaccaggaagaaacaaatgaacagcagcaaataagaatatcagaacaaatgctaggaggtatgcctgatctcaatgaagaggcaattggaagagagatttgttgcaaattagggcttggggcaaaggattcacagcaatcaaggggcgacaagcattaccatcaaagcagcaagtgagagatgcaagttaggggaagtgaattgcaagtgaagaattgataaagattaaagtaaggtaaatgcatatgcagtgaggaatacagagaggactggctcagtttgccaatatcagaggtactggcatgcgattgaagggtgtagagacatattagggcaaagaaacgaacaatgtactcaccaaagctgtttgtatgggtcgtggggaggaagaagaaggaagaggaagaaattgctggggatggtatatatagtcggccaccgcagtatgcgcgcgctggtagacttcaagaccatgaggcatgtaacgcgtgttggtggacttcaacttcaatatcatagagtatgcatgaaacgcgcgttagtagacctcaagctggttgatatgtaggacttagggcaaggacttgctacatggaacttataatatgagcctgatagtatggggtaggacttatagtatcagtatagaaggcttggaataaaaagcaagttagccatgaaaatccacagtacttagtactgatagtactagggcaacaaagaagaaatgaagctcaccagtccgacaaagaaagacacatactttaaagctcctggagctcaaaagaaaaaagataaaggaatacagcaaaagctaggtagtcacaaagtattatgaaattaggtatccacagaagagtctaactagatattatgataatctaacattttagggctgtaaacacccggcctaggcctgaaagcaaaaccacaaactccaaaagcaaaccagatattcccaatgatatagccctaaaacaccggctaaaaagaacagagacaaaaaaaaagcagaaggaaaacaaaatcaaaatcaaaaaggcttaacagagaacagcttcgagggcttcgacgtcgccgccagcgctgcgaacagctctcaatgcggcttcgctcagcttgcgacgtctatcgcgggcttcttgctcgcggcgagccttggtcttggaactgccagagggagcaactccggtcaggatcttcttgctgtcgtcggcagtaaagttgacgaacgatacgctgacagacttgtttgagcctcgggatgaggagctaggggccttggcgggcttgggggtattcatgctctggctggagagcttgcggctgtgtgtgcggcggtgggtgggcttggaaatggatccatggtgggtgtccctgggtgatgtgccggtcttgggagagagagatgatgatgaacgggagatttcgtggacttgggaggaggtgtaggaggtgtcgaatttttgagaggcggtagggagcatattagatgagaatgagtggtcggccgacatgtcatatgagggattgaattgaatcattagtcctccttgcatgatgtcattttggcttccaacgttttgcatgtggcggacaggtgtgggagatgcgaggtaagcggcctgctgttgagcgacccgagaaggcatgggggaccaccattgagattcctggccttggaggtctggggtgaaaggtagggatgaggcatggagagaatcggattgccaagaggagagagaatggaggtcggatgagtgagatgaagagaagatatcatcagcggaagaagggctggagttggtcaaagcggaagagcttgggtgagcaatgtagtgctgttgctgccgcgctgacattgcgatactcggcgactgcattggaactgacggagactggtgatatagccttgcgtcgtactgaggaggcatctctgccgagtctctagactggttcatgatttgttcggtaggcatgttctcatgctgaatgagggcatccgatggaggaggcgacagtggcaaacggtcttcggaattgtgaaggctgaagttctgaagtcgctgggcccaagcctcaggataggccatccttgatttggataggttggaagagcgcattaagctaggggagaaactttgcttgcgcagatgagagcgacgctcattcgggctgcggtggcggatagtcttgggagtgatgagagcactctgggtaggcttccgtctaggggtagctggaggggtagaaggcgagatagacagagcgtgtgttgctgtaggacgagagggaacttcaaagtggttcaggttgacatctgagatggcagaaggatggacggtgtcatggaaagcaaaatgatcggcagcaggtccgtcatactgcagggaccactcattactccagggttgcggtgattgatggcatttgggagtggagacagtgggtgcaagatcgccacagtcgtttgacagcgagtcaagcggaaagagctggtcaaactcggacaacgccgagtcttttccatcagcggcactagtttccatgttgacgtattggttgaacaagtcattgaacgaatggtcgtattgttgggcgaacatcttgccggatttccgtttgcggcgacaaagtaaaagtacggggcaaaagtgtagtcagcgactcaatacccgaaaggctttgatgtgattggataacaaagatatagtctcggaataagcttgggagagtttggggatagttcgggggaatcgacccggatatccgaggagtgcaaaggatgcaaaaagagggagaagcgtttgaatgtttggatgtttgatagtttgtcaatcaaagaaaacactgcagacgatgcaaagaaagcaaagcaaacaaacagatgcaagccctatttgaatagctgccagggacaccagcctcggaatttatggacacattcctcgtccatctttagagcacttggaatgtgctatagagggcccggttggctcctggtcggccccaccaacctccctcaagaatgcttcaaggctctcaaaccaatcgtagttgctggaaatacaatggctggccgagcagttaatctccgtcagatctaaaagacgcttcgtgtcggatagccacccacgggaatgcaaccctccttcactaagccagaagcagtggaacagccatcaaatgggttagtgaagcaggcctttaggggacttaggcatgttggccgataccttaattaaagatcgacatgactcgtacagagtacagagtaagagaacggccgtggaaatgggtcggaacgctctccgaaccgttcaggattgtccaaggaaccaggaccatacagcttggacagaatgatgatcacctatccaaggttggtacttgcagtgtaagcgtcatgatacctgatatcccatcatcaaccgcccgaaaagactcgagttgggtgacagtatgatcggccgtgcactgtggctgcatatttcttgcatttgcttcattatgattagccaattgatcaaatgggggtcggtaatgttgtcgattggtcaatgtcctgttagtgatagacggtccggaatgtgggttggaacgtagaggctgggcggaatgtcacctcccaccccgaacaatgcacagaagagttcttagtattcgagaagaatatgttttcctggaaagctccagtatgaatgttcccctgcttagaagttcggcgaaccttgacctgcaggagatcgccgtcccgggcccttattcgggagtgtttgcttcaaccccatgttctatatttggactgcatgaagatgatcaagataaggccatgtttgaatgcagtagaaaacaagcctttcctccgcatgagataaggatctgatacctcctttccccttcggtataatcgcgccatttagtggtcaaagtgtagtgtccttcaatcggtggggttttaggtggtttttggtacaaatctcagatgatattgattagccaattgtctttgggcgatttttaaatccgctaatagtctgtaatgcgttggtggcgtgtcaatgtgtatgtttcttcctttggcatcgatgtcgtgtttgagttgattcaggcatcacaaacaaagcagccaatattcaaacgaataaagatctaggcgagactgcaggattgacagacatatattgaaagagttaatatattgaaagagttaaaggacaagattcggtatagttgcagttcaaacccaaatcggccaatcagcagttgtgcctgtttcgtcaaacgcagtctaaggcgctaatgcagaatgcagactgccggcctgaataaaattaaaaatagagacagaaaaaaggggtaggtgtcaacaaaccaacgcgtcggcgagaagaagtggtctgcgaatatacgcgatgtgcgatctgggattgagatcgattgccctaacgatgcggcaatagcgggtggccccgttcaacaccatttgtatgcaatcagcaaggacagacttgataataagtcacagatacccctattaaacatgcagttattcaatatcatatgcctaggagtaaatagtaggaaatattgtgaaaatcctgagtgcgacactaaaaaaagcaaacccggctgagaggtactgtgtactccgcattccggtactcccgaggctattcaaaggccgatatagtgtactcagtactgtcacgagtagcatttggaggtataaccgagacaaacgatcaaatgcattcgaatgacctagaaataagttgcatatgactgcatattgtatcgaaagagcccaaacaaaatccccaaggtccagtggacggaccaagttcgggctgagtcagatgacgagaaattggggcgactgccctttcgattccagaaggaactctcctctctctttctcttccttttccccaggccactcgaaacagtgcccttggactattaattctctattactgttactgctactgcttctttgcagtgttccctcgcactttcctctgtactttgtgtcgttgccttgactccagagtcgacgtgactcaacccggatttatttgcccctccgtcacaccccgcgaaacgtgggacactcaactcttctctactttcatctccgctcttacctgccctcttgtcgcgtccttgtgcgataagcctttgtttttgcgacattgcgacccttgctgctctcgcgacattccaacgccgcttgcattgcgtcacgcgaacacaaattctctcctagccactttctaataccctacatgcatctcaacaaaacctgtggcctttttgttattcgtgaccgatatcaacttatttcgaatcattcaagcaaccagtctcgacactgttgcgcgcacccaaccggcaaggaagcacccttctacattcaatcataaagtgtatcaaaaaatcatgtctttcaacatttgtgctgggaacaagttcccctaaacttttacacgattcccgtgtgccttcactatgcacttttcaccgtgctttgcaggctttcgatgcccttgctattctcttgattcactctcgacttactgatatcaccttttcaacctcatttcttccacaaatccggtctctcctatagaggagtgctcggtcaaagcccagaatttcccaattcttgatatcttgggcaattcgccaaatcaccaaagaaagcgtcccactgaaagcatggacaacccaattactgagcaaatgagcaactcggccctccatcgaggctcgtgggaatctgtctcgtctgccttctcccacctcgagatgtctttttcccacgatagctgctatggctcggatgaagtttcggtcacatcgaatagttgcaccccaactcaatcaggtgtatcgactgctactaccaaaccgactttgcgtcctttcttgaaatcgatcctcaaaaactcaaccgttgcctttgactctgatgaagagtccggctcggagtcgggctatagctcagacggaattgattcggagtatgatgcattatctgatgaatccgacgaagaagatgacgatgatgattcggacttctcggtctgggatgaaacaaacggggatgtccctgagacgcatgaggatcacaccgagtcgtttgacgatgccttcatttcctttgaggagaattctgtgcgctttgacccgcaggtagagtacattgacagcgtggaagtatcggatgacgaaggtcctgatcaccaaatgacttgccatgaaatgatgatgcttgctcgggactcgaaaggcacccaaacacttctagatcaactcgataaaatggacatcgccgagtccagaaaagaacattgtcatcaagagtttggtcgcaaatctaccaaccaaccagaagagttttcccgcgatgccgtggacttggactgcagtctctttgtcgcttacatgaatggtatccgcgggattgttacaccgaagtacaagacttaccttcgagttcaggttgaccatattcgcttgggcaaggataccgaattcgtggatacagagggtgcgccttcgttgtatctcgacctagtctccaaccatgtcactggaaccttctgcaacctcctcgctgaggacgagctcaacgagttgatcagactccgcacagtagagcaagccggcaaacaaaacgatacaagctcgtcgaccctaggcttggatcaccaccaagtcctcttaaacaaaattgaaaaattcctgctggacaggttggcgagtggtcgggttgaaattggccctgatgaactgagcttcttcgctggcggcattgcgcacgaactcggtaccaaaacgttgcctgcacaggtctaagatctgcttgcacatcggcaaacaaataacacgactttacgattatgaccaaacatttctttcggattcgccgactatcagggcacacaatgggacggctctttagccaggaaaagcatttaaacttctcataagttgctttcggaataggttttgacagtggtcatgtattttcccgaactagcacttgatatgtattcaaaaaaaaacaatttcaaaacttcagatgttcgcaagttgatgattcaggtgtagctaaacctgtttttctgcctccgtgggactccgaccttgagtgcctagccaatcattctcattcactcctttccgacctaaaccccacctacaacatccgagtctcggacaaggcgagacggaaagaaaatgccagtcttgactcttaaatagtcgaagtataccatactgtaacaactgttcaacctcccttacccattttgagtcctagatactcaacgttttaaggttacactcactgtacatatacctatgtgttcttaaacatatgcacctattgctccgtgcttgcttaatattcacagtagtatgacgaagtatatatatcgtaccaccagctccgagttggatgtttcaaaagtctctaaatacatacccaatacacttatatttctaaccaaaatcaatatcagtatcacattacctaaagcccttttacacaacatggctaaacctataaatttcatacctatgcaggggttaaggaaaaaagatgctgtatcatttgtaccatttatgtgagaataccataaaggaacagtacctattgatctacagtaatactgtagttaaagattaattataacacgccattattctcctagaaatctcctagaaaatctcctgatacttctctaacacacctgatacgccaaccaagcccctttatcactagctggcaaagggcctagacactagtgggcgttccggcccggggaatttctatttttcttccctgcaggggagggatgggctgatgtatttttggacgaggcgtgtgctgtgcggagtaactgttttgtgaagaacgttgaagtattttgtatgtagatcatgggtatgcggagtacgtaactacggcttaacaagatcggttactactaaaccaccctatacaacatacaacataggagacttcaattttttatttttttttcactctcgttctcgttctctgtttctagtctccattccttcagaggtgggactttacatatgcaacggacttcatgcagacaagttatccacctagccccgtcaaaatcagcggggattatcagttgtttcatttgagggtgcaaacttggcagttagatgatgagtgacaggaaataatggatcagacggtatccagctccaccggttataagttcgatattgtatgtacggagtatgtagtcgggagttagtgctatgacgggtataacgcatatcttcatgcagtgaagatcacccggattggcatacgatagtacggagtataatccgtaaccttggatctatctcccaataacgctgctttcggaagaaatgtgaccgtttcgaagtgacatatcagataaacccaaaggtcaagttatcgactcgccgtttttaattaaatccgtcgatcacaacggcgtcgagcacagacagcacggggagaaacccaaaacccactgaggcgtagcatacggagtagctacggagtagggggctttcatttagacttttagaacgatgcggtgaatatgatctggccgaaatagactttgggctcctattctctctgtcattttttgcgtctgtcgtaccttgctgtcgatcattgacgatctcgagttcccttattcggatgatattctgctgtacggagtataatgtggttgatgatcgagcaaaatgaccatctgagtagcagtgcatacaatgtgctctgtataccgctgtgtcattctcgttatagatctcaagcatgaagagcctcacggagaaatacaccgatgaagaagaaatcgcggagatattcggccaaaaatccatcaatcgaataatcggttttctgctaacggcaggatcctgtggggccctgaaggattgtcaggaagggtttgacagctagggaacagagtggagtgtctttctttccgtatggggtacgtagactctaaaaatggagtttggggagcacggagaagggccagtcgctaggtgaaccaagttggttgatgacgattacgagtcatagtcatatccataactatggggttatcgggagtggaaatacagacacggctgagtaaaggcttattcgaatcagtgagaatgacaatattccaacgccggctaccacgtggtttgttaggcgatacggtgactcctgcgtgagattggatgaagctggtgcgtagacgatgttgtgggatgttgatgctgtacaagataagctgcttctagggctgaggggtggtacagaccagggaatatgcataaggataggatctgatatatcgctggatctatggagcagtgctgcaaggcgcgagaacaagttgtgcgctgtacatttattctttgctttttctgggattccggtagttggaaactcctgatcttctgcaggattaaggtgttatccgacaatgtgcattgttatcgttagttcctgctagtgcgcactacgttggagctgctggcaatagtcgcgaccctattgttcactgtcacataggcccacctgacccgagtcctgtcatctccgatgtatgaggtgggtaacggagtactccgcacattccgcaccttgtacacttgtattatccgttttcagctaactacaatatacaatatattaatagatggggctctcagcctctcattcgcttagacaggttcttcaaagaaattgattggaatggtcattccacgggtgagattcggcaaatgaagtgattggaggagccagagttgacagttgaatggttcagatcaggcactgcgcgtgacatagggggcctacaaggggaccgttgctgattgggggaatcgatataagtcgggataattgtctcagataggaaagcattccaaggcctggcaatataaaatgtatacgtaaagtttctagaaactgggaccgggtccccgtagcatggcatttgtgcaccacaggcttatcctcgtgtacccctgggagctgtggaacggctgaggaacgtgtggaaaaggatgttatgcgctaacaactgcactaccgaatgtgccccgtagtactccgtactagcgggtcatacctgaatgaggtacattgagatatcagatatcagaattgcaaataattccgggtccataccttgagagtgcatgcaatatatgtcctccgcgcatacagacaaacttcctttgaggaataatgacggaggccaaaaatcaataattataccagaaaggaaaggcgccaaagactaactgtgtccccgcccgaatccatgggacggcatgcaatgattggctgtccacgaccaatggggtctgaaacgaggtgcgagcggggcactttagcgtgctgatcgctgggacattgtcctgtgtttttttgcctgcgataggctttttctccgaatcagggggaagacggtcttgaatagctcaataagataggaattggaccgtacagtaactgtctaaacctgtatctatgtgagtaagttacatttcagagaaatagcctaattaaggtatggggtatacaaaacaaactgtaatcaggtaagattgtatgatgaatgtaagattgtaagatttgtatacacttgcaggtgctccataaatcatgccgtagtcgaccccgaatattcccaggtccccactgactcggatggaataattactcctgactctctttctcctggcctctacgggtcattctgtctcatcctctcgcttccttccactttccccatgccaatgcggtatgagcactgatcgcatctttgattcaaacgggtaagttggaaatccaccttccattgtcacgggggcccgtccagacgacgttgcgcatgcagtcgtacaagcccccgattccactcgagtcagatttcacccgcagaatcgtgtcagactgaccgtcctgggagtacaggatgatttgaaatttcgatttctacccagcgccttccggtccaaatcgaggtccgcgaaggaacacagaaaaagaggcaaacaaagctgtcaagtcgagccctcgacctaaatatacccggggtacacaatgcaatccttcaaaacacccgacttcttggagactggggccgtgtcccgttcgcgcagccccagtgtcgtttctagcgattcgcaattttctcgagtcaacctcatgtccccaccgtccgtgacgcccgctccagcattcatctcgccctctgcggcttcggatatcgtctctgccgaccaggagttcaacgccgctgattttgtcgccgaggatgaggaaaccggggccggcgccaccgcgctggtgaccccggccgcgctatcgctcctgaacggattcctcgataatctcttgtttaatatcctcgcttcgtccaagtcgacccagctcgcatgcattcgacccgccatggctgatgtgttgaagccccgcctggccaaggaagttgtagcctcggctgaagaagagttgggcgagtatatgggcggagcggacgatgagcagacggaattccgcggtggccaggagcccggcggcgattttgatctagtacgctcatggaagttaacccgtctacgatgcatggtctacacacggctgggcgatatggaagaggatgacgaagatgagtttattgcgcaggatagcctgggagagaccgatggagcaccccgcagattcagcagtcacgtcgacaatattacacccgcagcttctattttccttacctcgatcatcgaatacattggcgagcgggcactcgtcattgccggcgagacatcgcggtctcgtttgtcggcacaactcaacaatggcggtcctgagtttggatctggacatgagcggaaaagaatcgatcgacttgtggtggaagatctcgatatggagaagttggccctgaatgcaaccctgggtcgtctgtggcgcacgtggaggcagcgccgacgcggaaccaatctttctcgaacactatcccgtgaatcattccgcccacgtggatactcgctggcaaacagccgaaagagcagcattgtgaccatcgaggagccaataacgcccaaggagcctctccctgtggcgatgcccccgcctttggaccccgccactgtgcccttgccaacgagccattacgatgttcaagagatcgaggtccctggctatactggcgatctagatggggaggtacagaccatggaggccgttatcgctcacaaggtgcgaccgcgcagtctgatggtgttttcatcgccctcgcttgtcccaaaatctccaggttcagcaagcatctcgcccgtgagtacgtcagctattgaaattggcaatccaatccgtcatgtccgcacgaggtctctacctggtggggcacctacacccgacttcactgaggaggagccggagtggccgacagaccacccgtcacccactgcatcggagaaaaagcaactcgagactatgtacgaggatgatgaatcagcagaatatgtggatgcagctgaaaccagccctggcattgctatcacgacagaagaggaacaggaagagacaccacttatggaacctgtagaagaagcttccgaaattgcgagaatgtcgatcttgcatgaagaagaggaggagacacatcctgtcggggagacggttgcatcattgcacgctatcgcacaagctgaagacgctatgactgatcaatccaatagtcctcgcgtctccctcgtatccttgggtgatcggcggaatcagaaagacctagaagtgattgagggcactgggttatgcgaaaagcctaaattgacttcgacgatacaccgaccaaaacgacaaccctccaaggacgccagtctactgaatgcgaagtcgatctctgaacaaactagcgactctgaactgcaagccgttgcggagagtcagccttcagcgcaaggggttaagaccacgccggctccacccgcaccccccgtcgaggctatcacatctcgtaccgatcacgatgggacccctccgactcgaccatcagaggaatacaccgaaacagcaaaatctctttcccccgatatcatttgctcgacttctggttcaggtaattcgcagctatcgaaaacccgccccagaccttctccgttggaggtcacaaccaacaatcgaagctcctcttcctctacggttgaacgagccgctgttcaacgcatgtctcggccatcgtcatctatcaccactaaaacccgccggtctgggagcttcggcagtgctcgcgagaaaacgcgtccagtgactgccggctccactacctcgcaggtgtctagcaggtttaagggtatcatgaatcggccacagggtgaatctgggccgccccgcatgcgcagctcgtctgaaactagtcgcgcatctggcgggagcgtggactctgtagaagaacttgccgatttggacaagttgatcaacagcgacgagactatccattacactctcactccccgaagtgtgagggagatgacattccccaaacaacccaatcgttcagttcctcggtcagagacggcaggcgtctccgacctggctaatttcttaaataccactccgccaccaggggaagataagcaccgtcctcaaacctcggtttcctcaagagcaaccgaagagatgtctccaatttcccacaccagatccattgattcgcccaagcacatcccgcttaccacgcgcttgaccaacatgtcatcaacatcgaggtctagcaagattgggccggcgcgggatgcgcgagtcccaccctcggactcgacacgcgactttgcggatttcatgaaatcgactggtcctgctggtggggtaaacgagttcaaaccctctatctccgctgagggcacgcggtctgttcgtcctccatccgccgtctcttctgcctcccgtggaaaccgacctaagcttcaagctcggtctgctgagacgaaaggatctccgacctcggacctcattgacttcattcgcgagggacctcctatgcctgcaggtgctcaccggattcctcggacagttgcgcctttcaacgcccttgattcggatgatcttcagatggagaccaccacatccagttctttcgtcagcactgggaatgaatctacacccaataaatcattgacatctcttggttcgcggtccggcttgctggattcaaatcagaacaaggccccagcgtcgacaagcgccatggacttcgacgagcctcagccgcctgttcggaagcaacgccgtgctccagatccgtacgccattgacgacgatgacgatgacgcgtatctagaagagcttctggaacaggaacagaaccccaagcccaagcgcgaggaggagagcctgatggatttcctactcaacgctcctcctcccccttcctccgaacaacccccacagccatttgccgttcgtgctcctgcatcaaataatctctccggtgcatcgggcatgaaggcccgcttgctccgcacttctcataactccttgcgcacccaaaccgcccccaccaaggtccattctgactacgctaccaaggtcggtcagcagcgcaacaatggcaccctgccttctctctcaaatcgcccgaccaacaccggtgatttggcggatttcctccgaaataccggacctcctccagcccccgcgcgagcttcatcaacaccaatgggcgctaagacgaaggacggtagcttctcccgtttcttctcgcgtcgaaagaaggtcgaggcttagggttgaaatcctgacgacattctcgactgtcttgctttgctgagcgttccaatccatctaatgatctacatatcatgtccatcgctttgatattccttgtttgtgcgacaacactgcgatctttgtcattcctttcctctttatcttattcacatagagtcgtgtcctcgtttccttgctgttcgggtggctttttattatcttctttgcgcttgtgtgcgccattttattctctaccttctgcatgggacggaacaattaattcggacttcgggttttctattttgtccctttgtgggacgtcgctttgattgttttcgtggatttcgagataccatgcctatgtacctacactggggctatttttgtaccctgacattcagaaaccatttcattattctgtgaacattataactccaatacaagtaactactagacttacataaataaacaattagacctagcaataactatttgctgcgtgaaaagaatccctcggtcgaagtatagatcgtagaccgtaacaccggaacaaagttaatcccacactccccttaccaggtgtcatcaacagcagcaagcatccgtgtttacaaccgccaattccacgccgcaacaatgggcacctcaccaattacgctgagggccatcttcagcttcctttttgtcttcgtccagcttgccagcgcgctaaaattcgacctgatcgccacctccggcagcggcaagaacgagcgatgcattcgcaacttcgtctctaaggaccagctggtcgttgtcactgccatcgttggcggtacgaagggtgacggccagagggtcaacattcatgtatgtggacttatgtctggatgtggatgggaatccgtcctgcgtctgccgggactcggagaccaaaccgccgaattgcagattgcagattgtggatcgcgactaattcttccttttctgtgtatagatcaaggacgctatgggcaatgactacggtcgccctaaggatgtcgtcggagagacacgtcagcttttcacttcgcccgcggacacggctttcgacgtctgcttcgagaaccagcttgtcggccacagtaagtggtagtccctttgcacaacaccaacaatgcaccgaggaaaaggcggagttaaagagattgtcatgctaaaacaacattaccccatcagacaccatccagaacccctcccgccccgtcgaactcgacgtcgacattggcgccgacgcccgcgactggaacagcattcagtcgcaggagaagctcaagcccgttgaaacagacctacgccgcatcgaggagatggtcgccgatatcgtgactgagatggagtacctgcgtgcgcgtgagcagcgtctgcgtgataccaatgagagcaccaacgagcgcgtgaagtggttcgctttcggaactatgggcatgcttatcgggcttggtgcttggcaggttgtttacctgagagcttacttcaggtatgtgaaattgtggttgtggtggaaggtggagttggttactgactatttggttcttgtagatctaagcatcttatctagatttactagtccgtggaatggttgcatctttgatggttctttttttggtttttgcagcggttgcattgcaaatccttttgctctaacgtcgagtggcattctgttcaacagtcatgatctcaatgatataaaatgtacaccatgctttctgcagcctggcgctaataatattctctgtttatcgcttgtgttgtcctgggattgtggttagctatactttacagggtgcatcttcgaccttgtagtattacctgagtatttatggattaattatatagttctctatgtcggtaaagcactgcttaaatagtatgtgccttggtagatagccctggagggagcttccccagggcttctggtgcatgtgaggtcagtgtatacatctagattgacatctggtaaagggatcccgaggccgatgaagttaaaatatcagacaggccaagacgtcgaacaaatagtgtctcaattctaaagcccaaaaatagacataaagaactgcaccgtgtcgacaagtgtgtaattcacggcctctcagtggcctgccaggtcaatgtttagcattgcaaacagaacaaacaccgggcattgcaggagcttttcggttgcccgggcttattacgccggatgatgtcaaggccaagcatcactcatccctagaggaaaaaaaaagctcccaactccctctctataggacactttacaacaaaatgtccgccccacgtatactccatcgcctcgcgcgaccagtgccatcatccctaagcacaatcacaagactgaacggccaccgccaattcggcgcgacagctctccgtctcaaagatggcaacgacgaagctgcctctggggtaaaggcgcaccgcgccaaccagaccgacaaggtcccgaaccaattcgtgcccaacacaacctccactatgacaaaggacttccccagtgtcggcgagaagcccccgccaccggagatgctgaactcagccgaccccaactacagaccgtccgatccgtacccgggacggattgagcatttcaccggtggtcgtcaagacgatggagcgcgcaagcccgagcttgaagttggtgagatggagggtattacgtttaagattgagcctctgaagagggttggggaagatcttgtcacgaagagggcacgtctgctatgttcgtacccgtttccatgcatgctttgcacctcagtcccaaaccaaagccgaggacctggtgcatctatgtcaagaatgattgaagctaaccaattccactccagaccaaagccgcaagcgtggaatcctcgagtcggacctgctcctctcgactttcgcagatgtctacctgggcaagatggactacgatcagcttgtcgcgtatgacaacttcctcgatgagaacgactgggacatctactactgggccacgcaggacccgcctgaggatatctcacccgacgctcctaaggaggataccatcaccgagacttggaaggagaccggtgccaagagcggtgaatgggcgcagactattggcgctttcagagctgcttaccggcctattccgtcacgctggcaggactctgaggttctcacgctgctcagagagcatgttcgcgataagagcgctcttggctttgagaaggccaagaataagaagattggcggtggtaatggcttggggagaatgcctgatgttcaggtgttccactcgtaagggcctgtgaagagattgaactggatagtttgtcgatttcaaaactgtactatagttgtcatggccatgtttaattgtccataggaggcgtgtattaagaatgttgtatacctgatgatactgggatcaataggtgtaggattcacaataaggatagaaaataaagcgattgttaaattcgaataagacagacttagatgtaaatcaataattatccatctcaatatacatcgtagtccgtatagatccaggtcatgtgacccttcgcttagtattagggctccacggaaccacacaaggagagcagcgaagcggcttagggcttgggcgggcacgtctgcctcccatctcgattttacctccccccccagagtcaacgacaatctccgcccatccctctctctccttcattgtctcattcccatcatggctgagcagctggttcttcgcggcacccttgagggccacaatggctgggttacttccctcgccacctccctggagaagtaagagtgacctatcccgatcgggggattgaatttttgaagggacaaaattctgacttgaatgtttgataatagccccaacatgctgctgtccgcttcccgcgacaagaccctgatcatctggaacctcacccgtgatgagcaggcctacggttaccccaagcgcagcctcgagggtcactcgcacatcgtctctgactgtgtacgtttttcttctcccgaatgaaccacacccacaagccattggatgcgacacatggatttggatggcgcatttcggaaaaaaaaaagatggaatggttttggctgaccgatggtcttgtctgcgttataggtgatctcctccgatggtgcctacgctctgtccgcttcgtgggataagtctctccgtctctgggagctgtccaccggtaacaccacccgcactttcgtcggccacaccaacgatgttctgtccgtctcgttctccgccgacaaccgtcagatcgtctccggttcccgtgatcgctccatcaagttgtggaacacccttggtgactgcaagttcaccatcaccgagaagggccacaccgagtgggtttcctgcgttcgcttcagccccaacccccagaaccccgtcattgtctccgctggctgggacaagctcgtcaaggtacgctatcgattccgaattttcctacacaatttcctccccaccttgctttgcccgcgtgatgtttgcataaacgtatttgctacttcagagcccttcggggccatgagacaatttttcacccaatttgcctgatgggcacagcaacaatttttttgtttttttaaatcgaacgagagaaggattggaaaattttttccttgacacttgacattctttttttgagggtatcgacgctaacattcgatccgcgtctaggtttgggagctcgcttcttgccgtctccagaccgaccacatcggtcacaccggatacatcaacactgtcactatctcccccgacggatccctctgcgcctccggtggcaaggacggtaccaccatgctctgggatcttaacgagtccaagcacctctactccctctccgctggcgatgagatccacgctctcgtcttctcccccaaccgctactggctgtgcgctgccaccagcagctccatcaccatcttcgacctcgagaagaagagcaaggttgatgagctcaagcccgagttcgttgagaagggcaagaagagccgtgaccccgagtgcatcagcttggcctggtccgctgacggccagaccctgttcgccggttacaccgacaacaagatccgtgcctggggtgttatgtcgcgcgcatagatttgagttgttgtatcggagcttgaggagcctctttttgatctattgacaagggaattgaaaaaaagttcaaaagatacggccagaagcgcattggtttgggatgtatgagccacgagcaatgaagcacttctcgccgggacgaagtcgtccccggcctggaggttttctgacatgtctagcctactcgatccacatttaaaatgtatggaatcttgtgcaagacctgtgatgttctaataccagttaaggcatcaaaatgtttcctatttttctttattaaaaatctcttgtaaatcgtaccgtatggttatgttatatatctgtctcatttatcctcccacttgtgttctgaatcctgatgtagggcaatgctacgatagctgtcggatgtctaaattatatgtagaatggtttggagatttctatttccaacaatagtcataatgtacatttgaacagagggccctcacgtatctacccattatttctttccaagtctcttcaaagcctccttggccatcatacttccttcctcatatttaatcccatcagccaacgccttagcctcagtataccgctgcttagcgacttgtggcttcttctgtagctcagccaactccccaaggttatacgtcgcaaccacacatgtgatgtcacactcctcgtcacgtatcgggggtttaatgtgagccgcaacctcaatagccttctccgcccacttctgggcagcctcaacagtctgctccgctgtaacaggttcctgcggctgggccctggcaggcttttgaacctggccgactagagcggtagcaacatcgttcagcagcaccacctgtttgcaagatatagaagttccttcagcggcgcggatcaaatccaacgagcgcatatacagcggcatggctagctcatatcgctccttggcggtataggtagcggcaagctcggccagcgccgtcgctatctcagtaaggttcagccaggcctcgccgtctgccccctcgccactgctagcgctaccaacaggaaggcccagcatctggcggcggcgcatttccttcagacagatctccacagcagcgacctgcgcggcctcggctttcttctcgtcttgtatatactcgctggaataaagctcgccaagcttcatcgcaatgccgacgactttcttgagcgctttgtctcgctgacgagcctcgtactgcgccagtgcttgcagatcttcctggctttcttgaatcacctcgttgttaacctggacaatgggcgcggtcttctggacctgtcccttcgcttgcttcaccttctcggccgcggcagcagcgttacctgctgtgacttgctccacccagaccagagcctcgttcttcgttcgctccagcacatcaatcgccggcttcacaagtccggccttctccagcatcatagcaacctgaagcttgattccaaggatctcatctgagaacgggtgtatgcccatctcgaatgctgtgtgcagtgcctctctgtacgacttcatcgccttggctgggttgaggtcgatctcggtgtaatagatagccgtgcggagagcgtcggccaccggcggcgggaatttgtggtactgcggtccgacacgtgtcaattctacgtaggagatgtaggcaaagatgaaggctccgccgacaaccgagaagattgctagtggcatgaggacggggttcttgcgccagattcctctagatgcttcgcggtatttgcggctgattttctgcaggatcgtgaggtgccgtgtgccggagatgtaggggcttgcgagtggtttgccattgttgatgcggggttggagggttggtcgggtggtgctgttgatgtatattgagcgggcgaggctcttagattgtggttgtagaagttttgcggcaggcgcgctcgtgcgccgtgatgctgctcggaacattggggatgtgtgagtgggtattcggttgagatttcaagttttgattttgattgagcgggtgattgtctgatacaacctgggggattgacgaggatggagaggagatggaaaaggtatatggtgacgagagcccgccctcgattttctggtggtccaagctccgctccgccagatgacgtcgcccgctggagtatgcactcatctttccgcccattccgcctggaaaatgaactgttctcattcagctttaattgtgagacatcgctcttggatcagtctagtggtctaccctgataatgtgtgggcgatacgctttgggtgtggtaagctacggttcctacatctagactgtcctccagctgacgatcccaagcgcttggcgtatatccaacaacagctgcaggagcatggtatgcaagtggatgaagcaccggatgacgattcagtaagagagacatacaactttgcaccgggcaacttcggcgctgtctatcgcgctgagatcaccgataaaaagagccaacaagatgttgatagcgcgcaccaaaaccatgatttagaaaagggaaaagatgacgcgagctcggatgctaagtcagtagacaacacgattatcaaacacaagctccagagcatgaaatggggtctcattccattctggacgaagcgccagccagattacggatccatgatgcgcacgatcaactgtcgcgatgactcgctgatcgatgattcggggatatggactaccatgaaacgacgaaaaagatgcattgtcgtctgccagggcttttacgagtggctgaagaaggggcctgggggaaaggaaaaggttccacactttatccggcgcaaagacggagagctgatgtgctttgctggattatgggactgtgtttcctacgagggcatgccttctttctgatataaaacatcaagccgggctgacgattgcacaggttccgacgaaaagctctacacgtacacggtgatcacaacctcttctaattcctacttgaaattcctgcatgaccgtatgcccgtcattctggactctgggagtgaggcgatgaacaaatggctagacccccgccaaaagacctggtcaaaggagctccagtcaattctcaagccttacgagggtgaactagagtgctatcctgtccccaaagaggttggaaaagttggaaataattccccgaactttattgttcctgtcgacagcaaggaaaacaagagcaatattgcgaacttctttgccaacgcgaaaacgaaggagagtccaaacccctcttcaaaggagccgttgccgaaagtggagatggttaaggacgagcgccctactaagaattcagaatggagcgaggacaatgccccaataccggtgccagctgtcaaaagggagcatagtccagaggctcctgatgccgcgcaggaaagtaagaagcaaaaggtcgattcagatacaactaggccatcgccgcaaaagaagaagttgcgcagtgctacgcataatagccctatgaaaaagtcaagtgggacgaaggcagcagatgggtcgcagcgaattaccaatttcttcaagaaataatacacgcaatgaagcaagtgaaccttgcttctattattcggtcagccatgcttctcgctaatgtatatatatatttttttgtcaaatcaaagacgagaacaacatggtcgatttatatttaccagctgacatgtatctaatagattgagtgagctcagctccatgattgagttgaaaacagttcaatgcaagagaattgtcacgaacttttgagttcagcagcaaccgaatgcaagttgaaaagaaaaaaagagtagaccttcgagaggacttctgagtgaggatatatattacataggattccgtgggcgatgtacccgattttttgagatatcacttcgcaagctctcgtagcttctggaccagcttttctctgaggaaagaactcaatccgaaactatatcaaccaatcaacattggttactcatagataaaacatccaagaaagggggtacttacattccatctcgagtcaggatacgataggtacctgctaagtatcagcttggcctgttgagcctcatatcggaaaacataccactcggctggtaattgccattgtctccaacgaactgcccattggcatccacctcaaggctaccgaacatatcctctggcctgaatggaattagtatgaaataaaatgtacttgttgaaacacaagcaagcttaccaagcaatccgcccatagtcaggcggccgtctgttatcagaaatatgaatccaaccaccacgtccaccagagcctgcaccaccttgaccactagcaccactggtcgagtcggctccacgacgtctcccgcgctgaccggttagtaacacgccgcctgagttcaggttcgctccggccacagacaccatgacctgcgcctgcgacttggcatcggggtcttcatgcgcatattctgagcacacttcttgtacaatattcaggaatttggggttttccttgaaggtgtctgttgtcggtggcagttgagtcgcgagtccgatagctaggtctgggttgactggctcggggggtaataatgacaagatgtgggttccacttgctggtccagttgggaacacatactatgaataatttagcttcaaggagcgctttggaaggtgtaacaagcacatactatgtacggagacccttccaatgtcgatacacaacggaatcgagtccatttgggaagaacccgggcctgtcgtccaaacgctctggctgcaaacattgagatccaaatatagtaaggcagtgggtaactgagtaatggccttgcaggtagcaggtcggatataatcaaattcaagagagctggatcatagcttaatggaaatggcaggcggtttcgaaggcggtgaatataagccggaattaaagtggacctgaccagaaatacctaaagtagtctagcggggattgttgatatcagaaagttaaaaaaacattatagcctcataccaaagcgatggcagttgtgaaacaagtcggccggaaataagagaagccgttcctgctctcatgatcacgttaccattcaattaagcgagcccatgtcgttgtttgtctcatttgtgaatagtggc
